United States Patent Application Publication US 2025/0051766 A1 - sequence listing, part 24

SEQ ID NO: 5065 - DNA, 58617616 bp, Homo sapiens (residues 47,762,507-49,933,529 of 58,617,616)
  source 1..58617616: mol_type = genomic DNA
cactacactctagcctgggcaacagagtgagaccctgtctattttttttcctttttgagtctcgctctgtcacccaggctggagtgcaatgatgcgatcctggctcactgtaatctccgccaccctgtctctttaaaaaacaaaaacaaaaacaaaaacaaaccatggagaccatctgtaggcagcagtatggggttgtgaagagcatggtggagtccgtgtcctgatttcagacccgctctgttacatactggctgtgtgatgttgtgcaggttactcaacctctctgtgcctcagtgtcatatctgtaaaatggacataacaatagtgcttatcttgctgtgggttattacaaggatgagtgagtctgcacggaaagcgatcggaacaggccctggcacaggggaagctctaggtgagcatttgctgttataacaatgttagggtaggggaagatgattttaaaaagatgcagaaacttgcaatttgtgccagaggctcctcccaaatgctctgaccctttgacgcagtgattgcacgcttgggaacgtggcctacagaaacagccggaagttggggaagagcattttgcacaggccggtccttgagaacgttctgcagaatgggaggaaacgtggtcatggacatggggcgggccctggccacatggacgccacctctgtggccattaactgaggggtcggaagtgcctgcagccactgggaggtgtttgtgtttggatactttgtgggaaaaagcaaacaggatctgctgccgtccacactggcgttcatcagacaaacccccatgccaaaagtctcttgagtgggaggatttcagaggactccttcttactcttttttccagcatttccaatttttttttttttttttgagaaagggtctcattctggagcacagtggctctgtctcagctcactgcagcctcaacctcctgggcttaagtgatcccctaaactcagcctcctgagtagctgagacttacaggcccacgccaccatgcctggctaatttttttctttttgtatttttagtagagacagggttttgccatgttgcccaggctggtctcaaactcctgaccccaagtgatccacccacctcggcctcccaaagtgctgggattacagatgtgagccattgagccaggccccaaattttctgtaatggagcaaacttgaaaaaaaaggaatcgacaggattcttcctttgtttttgtttttgagatagaatcttgctctgtcccccaggctggagtgcagtggcaccatctcggctcactgcaacctctgcctcccgggttcaagcgattctcctgccttagcctcccgagtagctgggattataggcatgtgtcaccacgcctggctaatttttgtctttttggtaaagactgggttttgccatgttggccaggctgttctcgaactcctgacctcaggtgatctacccgcctcggcctcccagagtgctgggattacaggtgtgagccaccacgccctgcctggcggatttttattttcttccttagatctgcttttctgtgtcctctccacgtgctcccacgctcttcgtggtggtgggtgctgggtgggcagggctgacctccctccatcctttcatcagaggttagaagcaacatctgtatttcccagacacctcagcagctgggattctggatgagaattcggtgccaacaattagagacaccctgtgaggcgtggacggcaggagtgatcccggaattgcagctggacctggcgtccttgaaccgagcagttccagcagcggaactggagacagcagtgcccctgctgggtcagttcagtgctgtcctgggtgtcatttctgagggcttggcctagagctgctgcttccgcttcccatgattttttttttttttgagacggagtcttgctctgtcacccaggctggagtgcagtggcgtgatctcagctcactgcaagctctgcttccctggttcacgccattctgcctcagcctcccgagtagctgggaccacaggcgcccgccaccgtgcccggctaattttttcaattttttttagtagagacagggttttactgtgttagccaggatggtctcgatttcctgacctcgtgatccgcccgcctcggcctcccaaaatgctgggattacaggtgtgagccaccgcgcccggccagcttcccatgattttgtaagcactcaattccctgtaagatacctggagtggtttctatttaggtgctagagacaatcatgcattacagttttttttttttttttttttttttttttttttggagacagggtcttgctctgttgcccaggctggagtgcagtggtgcgatcatggttcactgcaagctccacctccccaggctctggtgatccccccacctcagccccccaagtagctgggaccacaggtgcatgccattatgcctggctaatttttgttattttagtggagatggggtctccccatgttgcccaggctggtctcaaactcctagactcaagtgatcctcttgcctcagcctcccaaggaccgaattaaaggcatgagccatcttgctcagactcct[133 bp omitted]aaccctgcctctattaaaaatacaaaaattagctggacgtggtggtgggcgcccgtaatcccagctgctcaggaggctgaggcaggagaatcacttgaacgcgggaggcagaggttgcagtgagctgagatcccaccactgcactccagcctgggggacagagcgagactctgtctcaaaaaagaaaaaagaaaaaaaaaaatccatgttaatgggtagacacaactcaagtgagagtaggttttggggcagagaaattcagatgaggctttggctggattaggcctgagcttcccgtttggcttgtgaacggcgatgttgctgagctggcggacacaggaaccagagctctggggacctggcagggagagatgtgtggtcagcgtgtgggtttgtggcatttgaggcagtgggactgggtaggagttgcacgtagaccaaaggtgacaggtgaaaggcagggaggtctgggggaaggagaaaaaggtggggggtggggaccagcacagggcactgagcagaggtggcggggagggtgtgggagagaatcggggctgcggatgagctactccccagcctgcccacacaaggctggaaggcaccctaggagggtcagccaggaggccggggcagggtatccattgctgagaactgcccggggagggggtgttcagggctgggagcaacctcatagcaccaccatggtcctgcgtgatcaataatgcccccactccctgatcctgtgtgaccatcaaatgcagggccgcccaagttcaaggagaatctggacgtgggagacagtggccgccaggaggcgccttgagcctgtgccaggaaccagacagtctgggaggtcccaagcggccctagctctcctgtcactcctgctcaggatccctcaaggggtcacactgcagcaggcagggtgacagctagaccctgggagggccagcgggttagtgctgctttctgaatgggcaggagcaggtccatggagaccgcttcctaggtctgtccagggggccttctggaggtctaggggctgtggcttgggggtcagttggtgagacttgagtggctcacactggttacaaaggcctccacactggccctgaccgggactgcggcccactggagttggggagcgggagccagcaggggttcctgacctggagagtgggagacggggggtttaaggtagagggtgagcaggagggaagggtgtggattctggcagtgggcctggaggcggacaggggtccctggccattagggccatgtgtctgccatggtgggggcagggcgagaagttgctgagacagatctgtcaaacccttgccgcttttcagtgagcaagggtgtcaggcttcacccctaacaaccacccacctgtcttttctcccattgccagtctgggaccttacctagaacccctaggggctgaaggaatgtttccccctccagggacagaatttcagggtgtcacatacccaaagctgtggtggtctaggattccacatagaggttctgggcttccagtcctgtgagtcaccagaggtagtagggaacctaaggaaggagagacgagagatagagggagacagactcagggagatgacgtcagaacatctggatccagctgtgcctgaagccctcccttaggcttttccattacacgagcgaagtgcttaagccagtcacaactcggcttcagacacttatgagcagaacttacctgaaacatgccctgatgtcccctcccccatctcagctgctttccccaggcttcgcttctgcccctgtcactggcgggagtccatccaaaccttgagtctggcgttcaagtctggccgcctcacccctcctcttgttggcacatcagccttgggcccctctccctggcccactgggttcctgcccctttgtcctcaagcccctctactccagaaagtcagcctgaattgcacccttctccccaccccacccacgtgaagtagaatcaagagcaataccgggctccccacctaaaagctggggggttggtttcaagtcttctcagtccgattattcccatctgaactccatgaacagggaactacagcttctcctctgacatcctaaacatctttaactattaggggtcatgtgaaccttgtatgcagaaggtgcttaatcaacgcctgctgatgcaggtgatacagggcattggttagtagcatggactctggagccaagctcctggaatcacatcttggctccatcccttaccagctgtgtgtctttgaggaagttaacctctctgagcctcaagagagagaatactagtgtctatcgttaaatgaggtaatacctattactttatttatgctgtaaatgctgacagcagtgcccagcacattgccaagtgctgtgtgatttttactatataaggagctcagaagaaaaggaaagaaaaaggaccacaatcaattccttttctttttttttttttttttttttgagacggagtcttgctctgtcacccaggctggagtgcagtggcgtgatctctgctcactgcaatctccacctcccaggttcaagtgattctcctgcctcagcctctggagtagctgggattacaggcgcccgccaccacgcctggctaatttttctatttttagtagagacagggtttcaccctgttggccaggctggtcccaaactcttggcctcaagtgataggcccgtctcagcctcccaaagtgctgggattacaggtgtgaaccatggcacctggccagtagagtctagatttaactcccagtttatagaatatactagggacagaggagcatgttagatgacaccacagagtgaaaccagtcaaatctagacagtaggaaacccaatcaacctgctttcttcaacaaatgaatgtcatttaaaaagctgagtgattggctgggcacagaggctcacgcctgtaatcccagcactttgagaggccaaggcgggtggatcacgaggtcaggaattcaagaccagcctggccaatgtggtaaaactctgtctgtactaaaaatacaaaaattagccaggtgtggtggcatgtgcctgtagtcccagctatttgggaggctgagggaggctgaggcagaagaattacttgaacccgggcagcagaggttgcagtgagccaagatcatgccactgcactccagcctgggtgacagagcgagactctgtctccaaaaaaacaaccaaccaaaaaactgagtgattacttccacgtcaagacacagatattgaggagggtagaaggcactgccgtgactagactggaatccaggccatctgaagccccaggtgggcagagatgctctggttacctggacatcctgaattccagaattccagcaggtgtctacttagggctgccacctccttgcagttgatttttggagcctcttgttgcctctggcttgaaggcccagctgtctttctaggtgttttcccagtgggcatggagctgcagcgtggctgctgggagcagcactatgtctccctgcccactagctggagctccagctagatgtgaaccaccaggcaggcgcagttgctgctggtgtccagggagcattgaacagcaggagggactgagggtagtaggagagaggagaaagaaggtgggtgtgaaggacaggatgtcatatcagtggtcttccttctgggaggaaacctcacctggctagactcctgtccactcacctacttgcccatcaacccatttatccacccaactgcccacccatctgtccactcatccatccatccatttattcatccatccatccatccatccacttattcatccagccactcataatccactattcatccactcatccattcactaatccactcatccatccatccatttattcattcatccatccatccactcatccatccatccatgggcaaccatcatcaatggctgctaaaaccatttggtttaggccgggcatggtggctcacgcttgtaatcccagcactttgggaggctgaggcgggcagatcacttgaggtcaggagtttgagaccagcctaacatggtgaaaccccatctctactaaaaatacaaaaattagccgggcgtagtagcgggcacctgtaatcccagctactcgggaggctgagacgggagaatcgcttgaacccgggaggcggaagttgcagtgagctgagatcacgccattgcactccagcctgggcaacagagcgagactccgtctcaaaaaaaaaaaaaatcattaggtttagcatccactcatccatccatccatccatccatccatccatccatccacccactcatccatccaattattcatgcactcatccacttgtgcatccgttgatccatccatcaatcatccatccatccatccatcatctatccatccatccatcatccatccatcaatcatccatccatcatccatccatccatccatccatccatccatccatcatccatccatccatccatccatccatccatcatccatccatccacccgccatagacataatgtcaagggaaagaatccagacataaagagtacacagtatgtgattacgtttatatgaagtttgagaacaggccaaactgatctatggtgaaataagtcaggccagtggtgacccttatgagggaattaactgggaggatgtgtgagaaaaacttggggaactggaaatgatccatatcttgatctggggtggttaaatgatattatacatatggaaaatttgctgatctgtacatctgaagatttatgtaaaaaatatatttttaaaagaaaaaagacctcactgagaaggtggcatttgaggaagtcacctgcactgcagaatgctcccagacacctgcagataccgtatacctttgtgtagccagcacacaaataacgggatggctactttgagtaccgtattgaccagaataaattataccagattcccgcctcgcaccgtatgcatttgtattgtggtacaatacaaatttcagtgtgcctatgttcctggcaaactgaagaggcctgacgggaactcagtgggtctttggaaaattctgcacccagtggaagaagagcctataagccctacttaaaaaaaaattttaaatctgaaatatgccttttccctttaaggaggtacaaaggcttatttgagcaggaaattaaacagacaccccctccccaccaacatgcctgaattccaagcacctggtgctggcccagagagagagaggggagttatcgcagggagagtgagataagaatttccttggttggtgctaacaaatgaccgagtttgctttcctgtttcacatacggtttttacatgatttaattgttttaaatgtttgtgaacattcagataagtgccatgtggtttttttgttgttgttgttgagacagaatctcgctctgtcacccgggctggagtgcagtggcgcgatctcgactcactgaaacctccgcctctcaggttcaagcaattcttctgcctcagcctcgccttgtggttttatagatggtttttgtgaaaat[135 bp omitted]aacctccgccttcgggttcaagccattctcgtgcctcagcttccctagtagctgggattacaggcatacaccgccacgcctagctaatttttgtatttttagtagagacagggtttcaccatgttggccaggctggtctcgaactcctgacctcaggtgatccacccaccttagtctcccaaagtgctgggattacaggcctgaaccactgcattcagccaacagtaaacttactaaatattttcctaaagatgcatttatctgacaaggatttgagtgcttgtcacgtgccactcactgtttagtttctgggcacataccaggaaagagaaccaaaaagaaaaactcgaggtgcacattccagtagggagagatggaacagaacatgaaaaaatcatgcttaggctgggcgtggtggctcatgcctgtaattccagcattttgggaggccagggctggtggatcacgtgagcccaggaatttcacgctggcctgggcaacatagtgagactccatctttgtgaaaaaaatacaaaaattagccaggcatggtgatgtgcacctgtagtctcagctacctgggaggctgagttggaaggatcacctgagcccaggaggtcgaggttgcagtgagccatgatcatgcgactgtactccagtctgggcaacagagcaagactctgtctcaaaaaaaaaaaaccaaaatcattattggtaagatacatagaatgtcagaggtgacgagggccatgaggaagagggggcacagaatgttgggggaggggttgcagttttaaataggatgtcaggggaggtcacagtgaaaagtgacattttggccaggcatggtggctcaggcctgtaatcccagcacttggtgggaggctgaggcgggcagatcatctgaggtcaggagttcgagaccagcctggccaacatggtgaaaccccgtctctacttttataaaaattagctgagtgtggtggcaggcacctgtaatcccagatactaaggaggctgaggcaggagaatcgcttgaacccgggaggcggaggttgcagtgagctgagattgtgccactacactccagccttgttgtccagcactccaggcaacaagagcaaaactccatctcaaaaaaaaaaaaaaaagaaagaaaaagaaaagaaaagaaaagtgacatttgagcaaagatatgaaggaagcgaggagagaaactggcaattatctgaaggaaaactgttccaggcagagggcacagtaaatgcaaaaactgtgaggtggatacgtgctacaa[212 bp omitted]gaggcaggagaatcacttgaacccaggaggcggaggttgcagtgagctgagatcgcaccactgcactccagcctgggcgacagagtgagactccatctcaaaacaacaacaacaaaaaacccaaaaacgttatgctaagtcagatacaaaaggtcacctgttgtacgagtccatttatgtgaaatatccaaaacaggcaaatcctttaaggcaaaaagcagattcatggagccagggactcctggggagatgagaagtggaaaggggctgcttgatgaatacggggcaacgtctagggtgaagaagatatcttggagctagacaggagtgatggctgcaaaacagtgtcaatgcacaaaatatccctaatggtacattttagcttacgtgtatcgtttgtatcgtttatttatttatttattttgagatggagtcttgctctgtcacccaggctggagtgcagtggcgtgatctcggctcactgcaacctctgcctcccaggttcaagtgattctcctgcctt[134 bp omitted]cggcctcccaaagtgttgggattacaggtgtgagtcacgccgcgcccagcctaggaatatattttgaaagtagatccaccgtaactggccgaggtacaaggggaataaaaaagagccaaaggtgactccaaggtttctggacttggtctagagttgccattgcctgagatggggaagactgaggaaggaggggctcagaggtggggcaggtgcaggggagaaatgggaactcgtgattgagatgcccattagacgcccgagtatagatgtgaagtaggcagttggaggtaaaaatttggaattcagagaaaattcctgggctggaaatatgcatttggaatttgcttatattcacaacctttaaaacgttgggagtgtgccttgtgtcttcaacctgtgaaaactgcccattctctccctacctaatgtagtagaatttttttgtttgtttgttttttatttttgagacaagagtctcactctgttgcccaggttagagtgcagtgatgcaatcttggctcactgcaacctctgcctcccgggttcaagcgattctcctgcctc[215 bp omitted]cttttgtatagctgtgtggctgaataaaggtgtttgatgtgttgtgtctctgggttgggtttgtctggatgtgcaattgtgtaaatgggtgaaggagatcacttgtgtgttaccatttgtcatgtgtgtgtttgtgtgtgtgaaagagagagaaaaggggagggggatggcctcccagcccagaagtcattactaattcctccagcatcccccacttctgggcaacagaggcccttttgttcacagtggcagaggcagtgatgtcccttctctcttgaggcccctggcaagttctcagccctgagcctggtcaacaaaaggtcctgtgagcttttgcattgagcccggccacttgcagagtgtgctgaggacatcagtgagggcacgggacctgtgacaaccacagtggcttggccagcgatggaggagccaggggcttagagagggccttcttgaggataatgttgttacaagataattatgggaaaaaagggaaaaccatgactgtcctacagatctaaaaatgaacacatggggcggacatgatggctcgtgcctgtaatcagcattctgggaggccgaggtaggagggttgcatgagcccaagagtttgagaccagcctgggcaacatagtgagacctcatatctattcttatttttatttatttttagttttcattttttcttgagatggagtctccctctgtcacccaggctggagtgcagtggcatgatctcagctcactgcaacctctgcctcctgggttcaagcgattctcgagcctcagcctcctgagtagctgggacaacagacatgcaccactaggtccggctaattttttttttttttttttttttttagttttagtagagatggggttttgccatgttaccaggctggtcttgaactcctggcctcgagtgatttgcccgccttggccttctgaagtgctgggattacaggcgtgagccaccacgcctggctccatctctattttttttttttttttttttgagacggagtctcgctctgtcacccaggctagaatgcagtggcgcgatctctgctcactgcaggctccacctcccgggctgacgccgttctccggcctcagcctccggagtaactgggactacaggtgcccgctaccatgcctggctaatttttgtattttcagtagagacgaggattcacc[140 bp omitted]ttggcatattgaagtcttaacccaccgtactttagaatgtgaccttacctggaagtagggtcgttgcagatataatcagttggggtcatactggagtaggatggtccctaaaccatcatgactggtgtccttaaaaaattcggaaatttgagcctggagaggtagctcatgcctgtaatctctgctcttggggaggccgagacaggaacatcacttaagcccaggagtttgagagcagcctggacaacatagcaagaccttgtctctacaaaatattttaaaaaattggctggggccgggcccggttctcaaagcctgtaattccagcactttgggaggccgaggtgagcagatcacttgaggtctggagttggagaccagtgtggccaacatgatgaaagcctgtctctactaaaaatacaaaaattagctgggcatggtggcgcatgcctgtagctccagcttgggaggctgaggcaggagaattgcttgaacctgggaggcagaggttgcagtgagccgagattgtgccactgcactccagcctgggcaacagagtgagactccgtctcaaaaaacaaacaaacaaacaaacaaaaaaatatatatggtatgtatatatttattttgtatatatatttttgtgtatatacatatctatatatataatttgtatttatagagatggggtctcactatgttgcccaggcagaggtttgagtttttgttgagggctctgggagtcacagaagatagctctatttgtgggtcattcactttttgcccagccctgtgttgctttacatgcacttgctcattaaatcctcccaagatcagggggatcagactgaggtgggtggagtcgacttgaactttgcttagggttctaagaggtaaagactaggggatctggggacagggaaatcccagatagagttaacctttttttttttttttttttttttttgatacagtctcgctctgtcgcccaggctggagcgcagtggtgcaatctcagctcactgccttctgtctcctgggttcaagtgattctcctgcctcagcctcccaagtagctgggattacaggcgtgcaccaccacattgggataatttttgtatttttagtagagacagggtttc[132 bp omitted]tcagagctctagttcttcctacctgtataaactcgcttactgctcacatcaaccatctaatggaagtgctgttttcatgttgtttcctgccctttgtctctacctgccagatcactcccatgaaggaagggactttgtttatttattcattgctgtatccctggaaactgggactgcaggtggttatgaagtacctatttgttaaatgagtgaacatttcctgtaggcaattacacccaacttccaaatggagaaacaggctcagagataagcccctgcaccctcactcctcaactcaactgcctgtttctagcactttccatgacgatcccctctgcacggagagggttcatggggagtgactattgttctgtaatgaatgaccaggctgtgccaggtccggcagtaggccttttccttttccttttttttttttttttgagatggagttgagttttgctcttgtcgcccaaacaggagtgcaatggcgtgatcttggctcactgcaacctgtacctcctgggttcaagtgattctcctgcctcagcctcccgaagagctgggactacaggcatgcgccaccacgcctggctaattttcatatttttagtagcgacggggttttgccatgttgtccaggctggtctcgaactcctgacttcaggtgatccacccaccctggcctcccaaagtgctgggatttcaggtgtgacccactgtgcctggccaggccttttcctttctttcttttttcgagacagtgtcttactctgttgtccaggctggggtggcagtggcacaatcacggctcactgcagccccaaactcctgggctaaagtgatccttccacctcagcctccccagtaactgggagtacaggtacatgccaccacacggactaattttaaaagtttttgtagagatggggtcttgctatgttgccccagctggtctcagactcttgggctcaagcagtcctcctgcctcggcctcccaaagcattgggattacaggtatgtgccaccgtgcccagccgcagcaggccttttgtttttttagagagggtcttgcttggtggcctaagctggagtgcagtggtgcaatcacggctcacagcagcttccaaactcctgcgctcaagcgagcctcctgcctaagcctctcaagtagcctgggactgtaggcacacaccaccacgcccggctgatttattatctatttatttatttgaggtggagcctcgctctgtcacccaggctggagtgcattggcctgatcttggctcactgcaacctccgcctcccaggttcaagtaattctcctgcctcagccttccgagtagctgggactacaggcacgcgccaccacgcccatctaatttttgtatttttaatagagacggggttcctccatgttggccaggctggtcttgaactcctgacctcaagtgatccgcccgcctcggccttccaaagtgttgggattacaggcgtgagccaacgcacccagccactaatgtattattattattattctgtagagacgcagtctggctatgttgcccaggctggtcttgaattcctgcctctgcctcccaaagcgctggggttacaggcgtgagccaccgcgccctgcggctgcaggtctttataaggcaactgtgggccctggaccgctccctgaaaacctccccctcaactccctgtctcctccctcacctggtctaccccgaatccttcccctctcgccccctcgccctctccaggggaggtgagggactcaagaatcgcgccctgcttctgtccccaccgcgccgtccccaagcccacgcagtgaaaagaccacccttgaggctgattccgggtccagctgggagcggccagccgtaaatcaccgcccccgtgggccgtaccattctggccggggggacctgggaggggacgcgcggagggcttcccccggggactgcctgtatcgagactctctccagcccaacaggaggatgggaaggagacttgtgtgggggcctcgggctggcgggtcgcgggttccttatcctccgccttggcgcctctccgcccaccgcccaccgcccctccctggcattggttggcgccaggggaagccgaggctccatcctttctgcgcaggttcccgccgcactcgcgcagacctagcgcgtccaggtgggaggttagtgtggcccgggcgtccgctcctcagcggatgtggcagccccgagccatggctctcgccgtccgagtcgtttattggtaagcccagcggccagcggcccccgtccccgacccccgccgggacccgattctcggagccggggtcagggagccccggggagaggacccatgggagcccttgtatgggaaaagggagcccctgtatgtgggtggggtgggcgtacggaggggcgaaaaacagagggcggtcgtccctaggccccgtcttcgacttgtgacacgctgggcatctcgggttataaaaggtggggctgagacgagtgtgtgtcaatttcgaacccccgactccggggctccgctggggaaggggctgggggtcagctttgtaaagggacctaaggctcctccaccctaaggcttcccctcccccaatatcccgaacagtcgcggggtggggacagtgagagcccagaaggttcgagaatgtctcagcctgtgtttcagaagcacttgaattgttggcctctgcccagtgggttcccttggccacgaaccccactccttttctggcctcagttttccgtctgtggcaagagggaggctctgtgtcaataccgaacacgcttaatttctgcaagtctcaggaagggtataataggataggatataaattacgttctctccactccccagcacctaatactgtgtggcatgctgtaggtatttaataaatacgtgttcaatgaatttatcctcccaggaatcccttaagagaggggaattttaggccaggtgccgttgatcacgcctgtaatccaaacactgggaggctgaggcgggtggatcgcttgagcccaagagttcgagaccagcctgggcaacccagggagacccccccctcgtctctacagaaacttaaaaagttagccgggcatggtggcgcactcctgtagtcgcagctgcttgggaggctgaggcaggaggatcactggagcccggaaggcggaagttgcagtgagctgaaatcgtgccactgcactccatcctggacagcagagcgagactctgtctcaaaaaaaaaaagtaaattaaagagaggaattttagttctatgttacaggtgagaaaactgaggctgggactggggtgggggcaggtcagtagcttcaagtctggactgcaggtgacaggggtaactggaacctgggtttgtcggcagctttccaacgtctctgcctgctcgacaaagcagaggcaagagtgacattttgagacgcctaccaggcctgtacaccagattccagtcccgaaatagcctgctgtgggggttgggtgagcctgtatttcaccctggggactgggaaggtgttcagaatctaggagctgcggggccgggtgcggtggctcctgcctgtaatctcagcactttgggaggctggggcgggccgatcccctgaggttaggagttcgagaccagcctggccaacatggtgaaaatacaaaaattagctgggcgtggtgtaagaatccaggagccgcagggttttccttggagtgctgcgagggctgtgggtgagggtggtgggcacagggagtgggtggggaccttacgtgtgctgttcttctcctaatccagttctcctggttttcccccgtccccgtctctcgtatttgtggtctccttgtctcctctctcccctttttcccctcccccttctctgtctcttgcttggtgttggttttctgtgtgtctctgtgtgtccccgcgccaccccctgtgctgtgtcccaaaactctgcctggctggtgcctgtcttctctcttgagggcatctgtcacctcttctgcttggtcatctgtgttcctctttatttcttcctggccccatcttgctctctccccacaccgcctgtgtctaccctcctctccccgatcccccacttctccctctctcccctgggccccaatgtcttggactctcctaccagtggcgcttgaggctacaagtccaaggtaagcagagtggatgcccggggggcattcctgggagctggggaggggtagagtgcatattgggagggggctgactggtatgacccctgctgtgacctctcaccgcgttttcagtatcttcagctcaagaagaagttagaagatgagttccccggccgcctggacatcgtgagtcttgggatggggagaaagacttgagcacagccactgtgtcggtccgttaggcctggatggcactgcaggggggttaggtcagccctacgcccttcacccatgttctcatccccctgggaaggggagggtctccccaagaggacatcttagcccctccaacatctcccctaccccctttcctcagtgcggcgagggaactccccaggccaccgggttctttgaagtgatggtagccgggaagttgattcactctaagaaggtatgtctgtctgtccgtcctgcctggttttggggctagcatggggttggggctgaggttggtgtctcggtcccagctcaccccttccctcttcctcccctccctagaaaggcgatggctacgtggacacagaaagcaagtttctgaagttggtggccgccatcaaagccgccttggctcagggctaatgcgccctgaaggcagaggtgagggggcccactagacagggacaccaccctttggatcttctccctgccccatgctctgactccttggcccagggtggagagcctgggagatgggggggacatcacgtgtgtccccagagcgagcgggataaagttagacccggttggtggaggacaacaactgagatggggtcagaggtgtgcagggtgacagctgagatggtgatgggtcagagatatgcaggatgacagctgagatggggtcaaaggtatgcaggatgacagctgagatggtgatgggtcagaggtgtgcaggatgacagctgagatggtgatgggtcaaaggtatgcaggatgacggctgagatggtgatgggtcagaggtgtgcaggatgacggctgagatgctgatgagtcagaggtgtgcaggatgatggctgagatggtgatgggtcagaggtgtgcaggatgacggctgagatggtgatgggtcagagatgtgcaggatgacagctgagatggggtcagaggtgtgcaggatgacagctgagatagggtcagaggtatgcaggatgacagctgagatggggtatgcaagatgacagctgagttggtggtggggtcagagggctgccctaaaacagctctcctggtttgggaatgaaaagtgctagcaacccaacggttcagaatccggaactctaggtctttgtcccattgccaagaaacagttcccaacccagcaggtcatgtgacagcgtccggccaagttcccagcatgttttgagacagaatttccttgctccacaatttcgagtaggtcactaattatcaccgggctctgaacctgagaattagttctaggaatattccagacctgatccagctccagaaacttacccactttggaactgaacatgagtccaagaatgctctagaaacaaatgctaactctagaatggattgtctgctccaaaaaaaccctagagctgactcccagttctccccatagagccgagaatgaaatacaccaccagctcccaacacactgtaaacctgagccccccttcccaacccagcaattgaaaaatgtgaaccagctcctaagcactagaattgaccactagttcctggagttggctactggttccttatcactgtttttctttctttctttcttttttttttgagatggagtcttgctctgtctcccgggctggagtgcagtggcgcgatctcggctcactgcagcctctgcctcccgagttcaagcaattctcctgtgtcagcctcccaagtagctgggattacaggcacatgccactatgcccggctaatttttgtatttttagtaggtctgatcctgttggccaggctggtcttcaggtgatccacctgccttggccttccaaagtgttgggattacaggcgtgagccaccgtgcttggcctccttaagcactctgaaccaagtattgtttccagcctaatacattgtggaacaagtggcaatttctatatgaacctcaggaacaaagaactactttccagcaccttctgagtctgattttccagtttgtaagccagtatggtccagataagcgtgaaacccaacccattctagaacagttactagccctttttctggtctctggcactgcagggcctggagcatagtttattttttgaggtggagtctcgctctgtcgcccaggctggagtacagtagtgtgatctcggctcactgcaacatctgcctcctgggttcaagggattcttgtgtctcagcctcgtgagtagctggaattacagatgtctgccaccatgctgggcaaatttttttttttttttctaagacggagtctctgtcgcccaggctggagtgcagtggcgtgatctcggctcactgcaagctccgcctcccgggttcacgccattctcctgcctcagcctcccaagtagctgggactacaagcgcctgccaccacgcctggctaattttttgtattttttagtagagacggggtttcaccgtgttagccaggctggttttgaactcttgacctcaggtgatccgcctgcttcggcctcccgaagtgctgggattataggcgtgagccactgcgcctggccatactttttactcccctctaaccttcagcaccagttcccattccatgttgatctagaacagagtatcccatcccaacacactgtggacccaagtaccagctcccagtgtgccttgtgccagaaaactagttttcaaatgcgttaaactcaagttccatttcctaaaattctttaccagagcagaatgaggtcatgttcaatgtgaattgggacgtgccaatttgaagtaatgcagaaacgatatcttgccttatgtgcaggtctgaaacaaagcaaatccctctaacataaaggaaaagaaaaatggaattgcctaattccaaagctgcatcagctgaatgcattgtgga[133 bp omitted]tcccaggctcaagcgattctcctgccacagcctcccaagtagctgggactacagttgtgcaccatcacgcccagctaatttttctagtttttgtagagatgggtttttttcaccatgttgcccagactggtctcaaactcttgggctcaagtgatccgcccgcctcagcctcacaaagtgctgggattacagacgtgagccaccacacccggctatctttcttccttttaacatgggccccacgcctggcctctgttcctgcaaactgactccctaccccaaccacctctttttctctccacagtccagggaccttgacccagcccctctcagcagacgcttcatgataggaaggactgaaaagtcttgtggacacctggtctttccctgatgttctcgtggctgctgttgggggcagagattgacgcccccggtctttgcctctgagcgggagagtctgtgtgtatgtgtcttccccggaatccacaccaccccaccctcctcctgtcccgtggtttcatcatatctctttgcataccccatgtcttccccagttgtcccctggagtttggggggacatcccgcctcaggcatccttctcaaggggaagccaagagaggcatcaggatgggtgggtttctgattgtggcaacgtttgcaaccgttcacgattcaataaatattggatgaatttaactgaatgtgcctgtgaggagtgtatcttgttttacccctgtgcctcctccctccaggaccccgtcccagaaattagcaaccacgtgttgagtgctcagtgcaccaaccctctgtagggaagcaccttactgcaatgctgaggttgttattttttaagacagtcttgctctggagtgcagtggtgcgatcccagcttactgcagtgtccctctcctgggttcaagtgattctcccgtctcagcttcccgagtagctaggaccacaagtgtgaactgctatgcctggctaatctttttctttttctttttctttcttttttttttttttttttgagacggagtcttgttctgtcgcccaggctggagtgcagtggtgcgatcttggctcactgcaacctccgcctcccggttccagcgattctcctgcctcagcctcccatgtaactggaattacagatgcccgccaccacacccagctaattttttgtatttttagtagcgatggggtttcaccatgttggccagactggtctcaaactcctgaccttgtgaccctcccgcctcggcctcccaaagtgctgggactacaggtatgagccaccgcgccggacgtaatttttggattttgtaatagagacagggtttcaccatgttggccaggctcgtcttgaactcctgacctcaggggatcctcccgccttggcctcccaaagtgctgggattataggcgtgagccaccatgcccggctgtttttgtaactattgatagccatgaagtgcatggacactttcctcaaatcaggtacaattctaaactgtttcactctcaaaccttgacccactcattctgggaggacagaaataaaattgttcctcccccaagtcaaatgctgcgactcctgaaacccaccacattccatggatctctgctcagtgacatctgggaaacacaagacagccatcaacaatagcaacaagaggccgggtgcagtggctcacgcttgtaatccggcactttgggaggccaaggtgagcagattgcttgaggccaagagttcaagaccagcctgggcaacatggtgaaaccccacctctactaaaattagcccaagtgtggtggcaggtgcctgtaatcccagctactcgccacctgccactaggttgagaaccgcttcaacctgggaagcagaggttgcagtgagctgagatcgtgccactgcactccagcctgggcgacacactgagacactgtctcaaaaaacaaaaaaaccccaaaccaaatgaacaatagcaacaagaaacaagcccccacatggcttcatttctaatgattctgaggattttcttagtatgacagtcctttggtggtatagttctttattttttttctaagacaggttctctgtcacccaggctagaatgctgtggtaggatcatggctcactgcagcctcgacctcctgggctcaagtgatcctcctgcttcagcctcctgtgtatctggaatcacaggcacatgccatcatgcctggctcttttttttttttttttttagagatggggtcttgctattttgcccaggtggtctcaaactcctggcctcaagtgatcctcctcctttggcctcccaaaatgctgggattacaggcgtgagccacggagcctggcctggtggtgtagttcttttttttttttttttttgagatggagtctcgctgtgtcgctgaggctggagtgtagtggcgcgatcttagctcactgcaacctccacctccctggttcaagcaattcccctgcctcagctcctgagtagctgggattacaggcatatgtcaccacgcctggctaattttgtgtgtgtgtgtgtgtgtgtgtgtgttttgtttttcttttttcaagtagagatggggtttcaccatgttggccagactggtctcaaactcctgacctcaggcgatccccccgcctcggcctcctaaagtgttggaattacaggcgtgagccaccgcaccgggccctggtggtgtagttctaagctaggtagagagagatcacagagagtggcatctgaacatctgagactcaatggaggttgaccgtaatcccatttgccaactggtctcacatttggggtcagcccagtatcaacatcctcagctgtcagcactccacctgttagccaaggcacactgtggcacccattcatcatttaaatgacacaagacttttcagttctttgtttaagcaagaattctggcagggctgggctaggttggcttatgcttcagtgggaacctaaatctaaacgaacctaaagcagaacgaacctaaatctccatggatgaacacagcacatgcaaagccctctccagagcaacagttctcctgcttctagtcaggaatctagcgcaatgttgtccaatagaactttctgcacgatggaatttttctctttttttgtttttttgagatggagtttcactcttgttgcccaggctggagtgcaatggtgggaccttggctcactgcaacctctacctcctgggttcaagcaattgttctgcctcagtctcccaagtagctgagattacaggcgcctgcctgtagctaccatgcctggctaattttttttttaatgtatttttagtagagatggggttttaccacgttggccaggttggtctcaaacgcctaacctcaggtggtccacccacctcggcctcccaaagtggtgggattacaggcgtgagccaccgtgccggctagcatgatggaatttttccatatctgccctgcccaacaccatagcaactgacttcatgttactggtgacaacttgaaatgtgacacgaccaaggaactgaatgattatatttggccgggcgcagtggctcacgcctggaatcccagcactttgggaggctaagctgggaggatcacttgagccctggagtttgagaccagcctgggcaacatagtgagaacctgtctctacaaaaaatacaaaaaacagctgggcatggtggtgcatgcctgtaatctcagcttcttgggaggctgaggtgggaggattgcttgagcccgggaggtcgaggctgcagtgatctgtgatggcaccactgcactccagcctgggcgacagagtgagtgcctgtctcaaaaaaaaaaaaaaaaagaaaaataacattcaacccatgtaatatgtggctagttgttatcggactgtgcaattctgttattctgttgctgcacctggccccaaagcagctttagtagacagagcggagacagcgtaggcaatcttgcattggcttttcttttctcttttctttcatttttttttttgagacagagtcttgctctgttgcccaggctggagtccagtggcatgatcttggttctctgcaacctccacctccggggttcaagcgattctcttgcctcagcctcctgaccaggtgggactacaggcgcacgtcaccacgcccagctaatttttgtatttttagtagagacgaggtttcaccgtgttggccaggctggtctcaaagtcttgacctggtgatccaccctccttggcctcccaaagtgctggattacagatgtgagccactgttcccggcctgcttttcttttttttaaagagacgaaggtatcgctgtgtcgcccaggctggagtgttagtggcatgatcacggttcactgcagcctggaagtcctgggctcaagcgatcttgccacctcagcctccgtagtagctgggactacaagcgcaccaccacttccagctaatttattttttttcattttgttggggaactgggcgaggatggggcagggtgggaggccttgctatgttgctcaggctggtctcgaacctggcctcaagcgatctttcccgcttcggccttcagagcaggcattggctgctaaaagcatcagccaggaagtgatgcgtatcagctttcgtcacagcccattggccagaaccagttacgcagccccgcccactttgagaacccctaccacgaaacccctgcctacctgcagaacttggctggggaacttagtcttcctgtgtttaggaaagggatgagaacttgaaaacttggtgagcactacaaatatctaccagggctcttattttaatcgtaccgtatgcatgaaaacgccagcatcggattttggcgtaatcaagacaattcacaccttcaaagaattcagcctgaccatcacccagcctgaaaaggggagacaccgtgaattcctttctaacagcgacagcatgtggccgcgtctgagaactgcatcttctcagttcacctcggatcaccgcggaagaccaggaatcactgtggaatccctgtgggtcaccaggaatcacttccggtcatctagattttagggtagtcaagtgaatcaccatctttgaattggtgacatgacactttctttttaaaacttaaaaattaaaatttagccgtgcgcggtggcttacgcctgtaatcccagcgctttgggaggccgaagagggcggatcacgaggtcaagagatctagaccagtctggccaacatggtgaaaccccgtctctactaaaaatgcaaaaatgagccgggcgtcgtagctcccagctactcgggaggctgaggcaggagaatcgcttgaagtcgggaggcggaggttgtagtgagctgagatcgcgccactgcactccagcctgggtgagagtgaaaaaaaaaaaaaaaattaaaatttttctaggtacatagtaggtgtatatatttatgggggacatgggctattttgatacaggcatccaatgcatactaataacatcagggtaaatgagttatctatcccctcaagcatttaacttttgtgttacaaataatccaattaaactctttttttttcttttttctttttttgagacggagtcttgctctgtcccccatgctggagtgcagtggcaagatctcggctcaccgcaacctccgcctcctgggttcaagcgattctcctgcctcagcctcccgagtagctgggattacaggcatgcgccaccacgcccggctaatttttgtatttttagtagagatggggtttcaccatgttggccaggatggtctcgatctcttgatcttgtttatccgcccgcttcggcctcccaaagtgctgggattacacgcgttaaccaccgcacttggcctttttctgtatttttagtagaggcggggtttcaccatgttggccaggctggcctcaaattcctcacctcaggtgatccacccacctcggcctcccagagtgctgggattacaggtgtgagtcactgtgcccggccacacaggcgtgagccacactgcgcctggccaggagattctttttaatttagcagttttcagaatattaaattggagcctcaacaactttctctagttttttttttctctcttttttgaggaccattgtgaaccaatggactttcatgcatctgacgtctttcaattcattgcagctcttctttgtaagctcaagttgttcagcctttggtttcttttcttttcttttaaaaaatattattatagaaacggggtcttgctatgttgcctggctggtctcgaattcctgggctccggcgatttgcccgcttcgacctcccaaagcaggaggggcttttgttttatccaagctctctgtccccgccccctcccccagtagcctgtcgggtgtctcctgcctccaaatcggatctaattctctctctgctctgctgagactggccctggcttaagaggactggaacacttgctacatgggaccaggacagggtcagagaaccagcgccggggagacccaagggccaggattgccaccagggggcagcagagaggcagagtagcagaaggaagaggtgggggtgcttccatctgacggcgggcagtgggagggcggggtggtggatgaggaggggatggtatagagggaacagtcctcccacccccaccagagtgggttaacagtacttacatggtcactggatgcgtattgaagaatgagcccgggctcagtgattcacgcctgtaatctcaacactgggaggttgaaatgggagggtctctggaggtcaggagttcgagaccagcctgggcaatgtgaaaaaaccccgttcctaccaaaaatacaaaagattagccaggcgtggtggcacgcgcctgtggtcccagccactcgggaggctgaggtgggaggatcccttgagcccaggaggtggaggttacagtgagctgagatcacacccattgcactccagcctgggcgacagagtgagaccctgactcaaaaaacaaacaaacag[138 bp omitted]atggtgaaaccccgactctactaaaaacacaaaaatggcatggtggtacgtgcctgtattcccagctacttgggaggctgaggcaggagaattgcttgaaactgggaggcagaggttgcactgagctgagatcgcatcactgcactctagcccctgggtgacagagagacttcatcccaaaaaaaaaaaaaaaaagagagagactgacagaaaaagaccaagaacattctgtatgtgatgctattattagctataataatggcagatatggtttgttgatcactgaccataatcagtgttaagatttacatgatttgactcatctaacccttctccaaaccctccctttcaccaaaaaatctttcatattaaaaattcacagttttttttttttttgagatggagtctcactctgtcacctaggctggagtgcagtggcatgatttcggctcactgcaacttctgcctcctgggttcgagagattctcctgcctcagcaccccaagtagctgagactacaggcacgcaccaccacactcagctaattttttattttatatttatttatttttattttattttatttttttgagatggagttccgctcttgctgcccaggttggagtgcaatggcgcgatttctgctcactgcaacctctgcctcccaggttcaagcaattctcctgcctcagcttcccgagtagctggggttacaggcatgtgtcactacgcccagctgattttgtatttttagtagagacggggt[135 bp omitted]ttaaagatagatgctttctttacattagataaaacacacttgtcttaagtgttcagtataattgctttgataaatgtatgcaactgtctgggtgcggtggctcatgcctgtaatcccaacactttgggaggctgaggcaagagtatcacttgaacccgagagttcaagagcatcctgggcaacatagcaagaccctgtctctacaaaaaataaaaaaaaattggctgggcatggtggtgtgcacctgtagtcttagctacttgggaggctgaggtggaaggatcacttgagcctgagagcttaaggctgcggtaagccatgtttgtgccactgcactccagcctgggtgacacagtgagacccgtctcaaaaaaggatcaacaacaacaaagtatacaactatgataccagcacccaaacaagaagcatccatcagcccccaaatttccctgggacctttttgcagtcattttatattcattctcacacctgcctgggcaaccaccaatctgctttctctaactatagattacttctgtctcttctagaatttcatataaatgaaatagtatcatatagagctttctgtaactacagattatttccatatcttctagaatttcatagaaatgaaattgcatcacatacaacctcttgtgtctggcttttttcacccaacataaatgattttgagattcttccatatcacatgtgtatccacagcttgttccttttcagtgctgtgttatagtccattgtatggacataccataatttgcttaaccattcacttgggctgtttctattttggtcttttatgaataaagttgttatgaatattcttgtacaagtcttcctgtggacatatgtttatttcttatttattatttttctcgagacagggtcttgctttgtcactgaggctggacacaaggcttgctgtgtccttgtcctgggctctagtgatcctcccatctcagcctcctaagtagctggaattacaagtgtgtaccatcatgctcagttaattttaatatttttatagagatggggtctcattatattgcccagactggtctcaagcagtcctcctgcctcagcctcccaaagttttttttttgagacggagtcttgctctgtcaccaggctggagtgcagtggcatgatcttggctcactgcaacctccacctcctgggttcaagcaattctcctgcctcagcctcccaagtagctgggactacaggcatgcaccactacacccagctaatttttgtatttttagtagagatgaggtttcaccatgttggctaggatggtctcgatctcttgaccttgtgatccactcgcctcggcctcccaaagtgctgggatttcaggcgtgagccactgcatgtggtccattttagttttaatatgcatttccctgatgatttttgatgtcatgggcttactggcctttttgcatatctttttttttttttttttttttttttgagacgggaggctggctctgtcacccaggctggagtcagtggcacgatcttggttcactgcaacctccacctcctgggttcaaccaattctccagcctcagcctctggagtagccaccacacctaatttttgtatttttagtagagacaaggtttc[133 bp omitted]tgccatgttgcccaggtggtcttgaactcctgggctccagccatcctcctgccaaagcctctcaaagcgctggaattacaggcatgagccactgtgcacagcctggtctaagaaatccttgctcactccaagactgtaaaaatattctcctatggatgcttctagaagcttcctggttgtagcttttcatttggagtgaggtgggagtcaaggttttttttgtttttgtttttgttttttttttttttttttgagacagagttttgctcttgttgcccaggctggagtgtaatggcgtgattttggctcattgcaacctccacctcccgggttcaagtgattctcctgcctcagcctctcgggtagctgggattacagtcatgcaccaccacgcccggctaattttttagtagagatggggtttctccatgttggtcaggctggtctcgaactcctgacctcaggtgatctgcccgcctcaacctcccaaagtactgggattacaggggtgagccaccgtgcccagcccagtttatttttatttatttacttttttatggtgaaaagatatacatatattgagaattagccagctggactcagtttagatgatcccaattttgttggcaacatccaaagcattgtaaccaggagtcggttgaacatgtgacttcttctctccgtcaggccgaatcagagcttcttcacagcctgtttgatctggtgctccttggctttaacatctataatgaaggcaagtgtgttgttgtcgtctgtcttcttcatggcggactcagtggtcggcggaaacgtgatgatcgcagagtggccaagcttgtttctccagggggcgctcttctgaggatatttgggctccctccggagtcgcgctgtcttgggccgcctgaaggtgggtgacctgcggatcttctcttctgtgtggctgtggacggctttcaacactgctttcttggcctttaaagccttcggtttggcttgggctttaggagaggcaggagcttccttcgctttcggcagcatcttgtgaaaagacaaggttaattttt[137 bp omitted]cggtgaaaccctgtctctactaaaaatacaaaaaattagccgggtgtggtggcgggcacctgtagtcccagctactcgggaggctgaggcaggagaatggcgtgaacccgggaggcagaggttgcagtgagccgagatcgcgccactgtactccagcctgggcgacagagctagactctgtctcaaaaataaaaaaaaaaaataaaaaaaaataaagagggagtctctctctgtcgccaggctggagtgcagtgtcctgatctcggctcactgcaacctccgcctcccaggttcaagcaattctcctgcctc[135 bp omitted]acctcccaaactgctgggattacaggtgtgagccaccgcgcccggcccaggaccatttgttaaactccccatcctctcatcaaattgacttgatactttgttcaaaacaagttgattgcatatgtggatctatttctggattttctcttttattctactgatctctttgttgatctttatgctcataacacactttcttgactactgtagctttataataaatcttgaaattaggtagtatacgttctccagttttgttctttttcaagattatttggctattctaaatctgcatttctgtctaattttaggatcatcttatcagttttatcagaaaacttgactgagattttgattgggattgcaatgaatttataggcagatttggggagactatccatgaacatcagatgcctttctgtttatttaggtctttttttttttttctttttttttttga[131 bp omitted]caccaggcccggctgatttttttgtattttttttaagtaaagacggggtt[142 bp omitted]ataattgtggtcgtagctgtcctgcacatcctactttcttcctaggcattttataggtgtgtgtgcatgcgtgcgtgtgtgtgtgtgtgtattttgagacagggtcttgctctgttgcccaggctggagtgcagtggtgcagtgatgctgcctcaaactcctgggctcaagcaattctcctacctcagtctcccaagtagctgggactacagctgtgcactaccatgcccagctagtgttatttttaattttttttgtgtagatggagtcttgctttattttacagactggtgttgaattcctggcctcaaagtagctgggacgacagctgtgcaccaccatgcccagctagttttattttttatttttttgtgtagatggggttttgctatgttgtacaggctggtcttgaattcctggcctcaagcgatcctcctgcctcgatctcccaaagtgctgggattacaggaatgagccgccacactcagcctattttatgttttttaatgcttttgtaaatagtgtttttaaaaaacttattttccaattttttgttgctattatatagaaatataatttgtttctttttttaaaaaaaaattcccacacaacaccaagatatacaattggtttttgtttattgattttgtatcctggaaccttgccaaattcatgaattaatcccaggagtttgagtgtgtgtgtgtgtgtgtgtgtgtgtgtgtgtgtctgtgtgtgtgtttattctgtagatattttcttatgttagctacaagagttaccactttatccaagatacagttctgtaatgataaaataaaagcacttctctagcaagaaattctgagtgtacaaaagtgaataggccgggcgtggtggctcacatctgtaatcccagcacttcgggaggccaaggcaggtgaatcacttgaggtcaggagtttgagaccagcgtggccagcatgtgaaaccctgtctctactaaaaatacaaaattagccaggtgtggtggagggtgcctgtaatcccagctacttgggaggctgaggcacgagaattgcttgaacccaggaggtggaggttgcagtgagccgagatagcaccattgcactccagcctgcgtgacacagcaagaccgtctcaaaaaaagaaaaaaaaaaaaagtgaatgaatacagaactaaaaataaatttccattccatccccattcccagagctgactgcagccaaaagacagaagaaaaaagtggaagggtttactttttttttttttttttttgagatggagtctcgccctgtcacccaggctggagtgcagtggcacgatctcggctcactgcagcctctgcctccggagttcaagcgattctcctgcctcagcctcctgagtagctgggattacaggtgcccgacaccacgtccggctaatttttgtatctttagtagagatgaggtttcatcgtgttagccaggctggtctcgaactcctgacctcgtgatcggcccgcctcagcctcccaaagtgctgggattacaggcatgagccactgcgtccggccagtttacatttttcatcacatatgcagagaaaatcaggtgtgtctgcggaacatctacaacacgttccactcactgccccaatcagggagagcagattctgcagctttgttttgtcttcctgaggagtctctctggggcttatataggggaagggctccaggagaccctgacagcacctactgctgtaactgaagtctcacggccagtaaggaggcatgagaaggtgccagcacgggcttgagaagggttttgacatcatccaccaatatgtcccatctccccttcaactcttctgtgacccggctgagattctgcagatgccgcctcaccgggctctaagaggattggggcaggtggtgagttagattaggtcaaggccagggaaacctgcaagggagaaacgcagggactgagagggagggagagagactagggaaggagagggaaggggagcatgggtctgcacagggcagagagaggtaggagatgagtcggaggtgggaagagatatgggaggagggtgttgtctaaatggcagaataataagatcccccgtttcctccgagcttcctgtaagctaggctctgtgctgggcatgtcaatgacacagctccatgttgctcacaccccacacgtatggagaaggtgtagttgatacccaaagtctcatggacatccagctgtccacaggtcctcctccaaacactccaagaagcagatgagcttggtatcacttgatagagtggaggagttaagggctgtgctctttggctgggtggcctggtacatgctcagactgaatctttttggtcttctcagaaagggacttaaacaccctgatgtttggcgtaaccccccgtaggcaaagggattacaggctgccaacctcaaaggaccttttgtaaggatattagagcacataggacagctgctgtcacgtgggaagtgacacgggctggggagaccctacctgttctggttttgagggcaggaaactcccatgcctcagtttccccttttctttgcacctcactttccctctctccctccccctcagtctctcccttttcccatcgctctgcctcccttgggacagtctcagtgtggttttctgtgtacatccctctcagggtctctctgaggagcaggagcatttttcattatatcccggcagtctgtccccacctccaaccacagcctgtcacatgtttcccccaaatccgcgctaattctccctatgttttgctgaggctggcctgacttaagaggattgaagcatttgctaaatgagactgggacagggtcagagaactagctgtgggaagacacaggggccaggatggccacaaggtgatggcagaagaagcaggagaggagaggacagaggcaaagggtggcatgctattggtgcaaggatatagagaccaagaacccaatagagactttccgtagagccagtcattgtggctcacacccgtaatcccagcaatttgggaggccaaggtgggaggatcacttgaaccaggaattcaagaccagcctgggcaacatggtgagaccttgtttctgcaaaaagtaaaaggaaattagccaggcatggtggtgtgtgcctgtggtcccagctactcagaaggctgaggtgggaggatcagttgagcctgggaggttgaggttgtag[132 bp omitted]ggctagcggatcaatgaggccaggagttcaagaccaacgtagccaacatggctaaaccctgtctctactaaaaatacaaaaaattagctgggcatggtggtgcacgcctgtaaaaccagctactcaggatgctgaggcatgagaatcacttgaacctgggaggcagtggttgcagtgagctgagatgatgccattgcactccagcctgggcaacagagtgaaactgtctccaaaaaaaaaaacaaaaaataaaatacaaaaaagtttgtagatacagactcatacattaatgaacccttgatttatgacaaaatacaaaataaattgcaagcttctcaataaattgacaattagaaatccatgagaaaagaaaaatccttacctcacaccataaacagtcaattatacatgtattaaagacctaaatatgaaaggtaaaactataaaaatttagagaaaaaaatggaataccttcatcatcatgtgataatgcaagatttctttttttcctgctgtttacctgatcttggggaaagttttttttttttttttttggagatggagtctcactctgtcacccaggctggagtgcagtggcacgatctcggctcaccgcaacctccgcctcctgggttcaagcgattcttctgcctcagcctcctgagtagctgggattacaggcatgtgccatcacacccggctaatttttgtacttttagtagaggtggggtttca[141 bp omitted]aaagcattactcttagaaggcaaaagtgagaaaatgtagcaattttcgaagcagtaagctggacacctcagactggtgccacctgtgggctttgtctccaattagtaacaattagtaacagaggacttttagaaacaccagcttttagaagtttttctgtcaatttgaaaatacagatatattgagatattttgtaaaagtcattttattttatttgattattttatattttttagacaaggtctcagtctgtactccaggctggagtacagtgatacgatctcagctcactgcaacatccacctcctaggttcaagtgattctcctgctttagcctcccaagtagctgggactacaggcacctgccagcatgcccggctaatttttgtattattattatttttttagtgaagatggggtttcaccatgttggccaggctggtctcaaactcttaacttcaagtgatccacctgttttggcctcccaaagtgttgggattacaggcatgagccaccgtgcctggcccattttaatttttattaataacttcattgtgttttacaacattatcagtctgccactgatggaaatgaaaaataaaacaagacaaaactggtccaaaacaataggtaatttgaaaagcagtgaaatagacaacattaaaatcaagaaatactaatgaaacaaaatgcaaataggaaaggtgtctgcagaactttaattgccaagagaatataagaatacattcaaataaatgaaggaaaaggggtaaacaaatacacattatgaagatatctaaggttcaattaacatgtgagggtttaacttctcaatcatcagggaaatggatattacaaccacaacaaaaccacaagtcattggatcgacaaacattaaaaagtctcacaatcctaagtgttggggaagatgctgaccatcagaagccctgggaaaagccctttagaaagctctcgagcagcatccactaatgccagatatcccagtgagcagcgactccaatcccagcagagaaacgctcaggctcaattcaaatgacaggcaggcacattcacagcagagccacctgtgatagctgcacagtgaagacagcaaatgtccacctgcagcagggtgggtaaagggtgatgcattcactgcagaaagtcaccagcagtgtagatcagccactccaggccctctgggatctgaagaactttgcaggcacaggccccctataaatccagtaataacctggggcctgagtgattttcattcacagagccaccctcctcttggggctgagaccctgagtgttttttgcccatagagtcatccccttcttggtactgagaggtcatggtggagactgaggatccctccaaggggtctaggggtaggagcagctctgtgaagtgagggaataactgggtgtctggcaagaagtcggaggcatcggggctctgaggccataagggggctggggctgggagtgatcctgggcctgggattggagctgggactgagcctgagcctgggcctgagcctgggcctaaaatcggggctaggcctggaagtgagccagggcttcgcatccggccaggacttaagatgggacctgggccttggagtctgcctgggcctgggatctgggctgggctgggaatcgggcctataattgggcctgggcctgagattgggcctgggattgggcctgggatcaggcctgggttcgggcctgagattgggcctgggatcgggcctgggttcgggcctgagattgggcctgggattgggcctgggatcgggcctgggtttgggcctgagattgggcctgagattgggcctgggatcgggcctgggatcgggactgagattgggcctgggatcgggcctgagattgggcctgggatcgggcctgggtttgggcctgggatcgggcctgggtttgggcctgagaatgggcctgagattgggcctgggatcggggctgggcctgaaattgggcctgggattgggccacggaatgggcctgggatctggactgggcctgaaattgggcctgggattggggctgggatcgggcttgggatctgagctgggcctggaattgggcctggaattgagccagggagtgggcctgggatctgggctgggcctgggattggggcagggatcgggccagggcctggactcagggcagctgggatgcccttctgggctctgcacccagggccaccccaggcctggtggaggctgcagatcgtgggttccgccgctggaaggattcccgaggggccccgctgaggtgcggaggcagaggctgcagggactaggggcgcagcgcgggctcctcggcctctctgcccagggacgcgctggggctgctgctggagccgccgctcccgagctagtttggcgcggcgattcttgaaccacacctggggggcagaggggacagggagaaggtgtgaaggaggggctcgcgcggcccagtgagccttttggggtcggggccagcctgaagcctctccctgtgctcaacagccccccatcccccaccccaccaaaagagggccccggctccaaggcctggagaatggagggaagagggagggaaaagtagggggaggagggtggggtgggatgggaggagcggggtctgccgcccaggtgcccggggggccagggagggttcgaggggagggaccgcgggttctcacgggtgcctgaggtccgggcaccgggagaccccgtgggggacagcctgggccgatcatgtgggcgagtttgggctagcatagagttggaacaggactcaggatgcagccctggtctacactggcgggaccccttgcgtggcagggcgggaggtggtcgggcgggccaggccccggtgagtgacagcggtggggaggctccttggggtgactggggcgggcagggtgggggtgggggtcagacctgcagctgttgctccctgaggctgagcatctccgccagattcagtcgctggtcgtagttcgggtactggtccttctgaaagtaaaattctagcactttctgctggctttcagtgtagaccgtgcgctcctgccgctgtctccttggagggtccagggccaggggagggcctgggggtgggagggaaacaggtcacagaaacccccaggcagcccccagcccccctagggaccccgtcccctgcaccaggccaggagcccaggcagtgtgggctggggcggcaccgcggatagcagcctggtatccagaccagaccttgcacctctctgggcctcagggtccacatctaggaaataggcgcgataacagctcctgggaaggcaggcagcgtaggcgcctcacctcggagcagacggggctgcctcaggcctgctcaaccctccccagctgccccgtcccctcccatccaagggttatagggaccctgacacttgcaggggagccgccacctgcccagtcctctgctccactcaactgcatggtttaatttctttccttctttctttttcttggaggggatctcgctctgtcacccaggctggagtgcagtgatgtgatcacggctcaagtcagcctccacttcctgggctcaaggaaccccccgccttagtctcccgagtagctgggaccacaggtgtgcaccacgacccctgggtaatttttgtatttttgctaaagacgggtctccactatgttggctcggctggtttcagagtcccgggctcaagtgatcctcccaccttggcttcccaaagagctgggatcacaggcgtgagacgctacacccagctgcatgatttttcatttcccagacaccactaagttctcccccgtctgcaggacaggaagccgcccgcacaggcccagcccttctctggctgcccagatttgcactctgcagcctcagccacaggatcagcccagacccctcacacctctgtccccgctcaccttggagatgaccagggtcttgcatcctgagtcctgatctgttcccaaacacaagtgtgtactgacaagggcttggctcttaaatcacttctctgctgtgcccaccctggcccaccctgccgggaccctccctttcccaccctgccctgcagtcccgccccctggaggagttgaatgatggattaatccttcatcactgatcaggtactgcctgctgagctgtgctaggagctggagaacctcagtggacaacacagccttggtttcaccctcatgggccctagcccaggtgaggtggcattccatgcgggtttggttgggggagtcaacatcgtgacctgtggttggggtccccatctcaggagaggcaccgccagccagcccccaggagtcatccttgttccttcccagggctggggccccgagtgaccaatgccggtgagtctacccactcctcctggctcctgggctgcctgccttgtccagccactatccctccttcctggatgaccttgcaacctcctctttggtacctcaaggccactctggcccctactatccattccaaaaattgctccctaggtgcctataggtgtaagcagagcttagtacacattggccctgctgataatggtttggtttctgtagtggatttgcctatggggtgaagttctgataggcattcacatagacctctgttggtttctcctggagagtaaatgacctcagtgctggtttattccagtttatatacggggctcgtgtgctgggttcacatgagcccagcctctccaagctgcatagacctgtatcaggagggggcacaggtctgatggacgtgcccatggaccgctgctggtctgcccttgtgagtgaatgaacctactgctgatgatacaggggacccatgaccttggtctacagagatcggatccctcagagatgcgtcttctctgtcagacacctggctgtcctcatttccccatggcaggacccacgtgggttcagggattagagagattgacaaggctcatggtgcagggaactagaaatgactcatgcaatcaatttcaaaattcaataaaacgtagacattgttaccacgggcctcgctcattgttttcacctgctacttagagttctgctgtagaaagcagcatccccagcaatgattcctcatcgcacacattgtccggcttcatctacaggacatgctgggaacacagtagtgaccacagagattttgcaccatggctatttatttggtcaataaagacataaacagatgaacaagctcactggtactattttgtgaaaatagacatttaaatataagcaagttcacggcagcatgattcactatcgcccaaaaggagaaaatgctga[139 bp omitted]catggcgaaaccctgtctactaaaaatacaaaaattagctgggcgtggtggccagcacctgaatttcagctacttgggaggctgaggcgggggaattggttgaacccgggaggcggaggctacagggagtggagattgtgccactgtactccagcc[138 bp omitted]catggtgaaaatccgtctctactaaaaatacaaaaaattagccaagcatggtggcgggagcctgtaatcccagctacttgttaggctgaggtaggagaatcacttgaacccgggaggcagaggttgcagggagctgagatggtgccactgaactccagcctgggtgacagagggagactctgcctcaaaaaacaaaacaacatcccccaaaaaaacccacaaaaaatagaaacccaaaatgtcatatatttacacaatgggatattactcaaccatgaaaaggaataaagctctgatacgtgctacaacatggatgaaccttgccaacatgatgccgagtgaaagacgccagactcaaaagcacatatacgattctatttatacaaagtgtccagaataggcaaatccatagagacagaaagcagattagtggttgctacgggttggggagaagggaaaattgggaccaactgggaatagctatggagatagctattggggacggtgaaaaatgttctaaaattgactgtagtgaaggaggcacaactctgcaaacagactaaagacgatttaattttttttttttgagatggcgtcttgccctgtcacccaggctggagtgcagtagtggtgtgatctcggcttgctgcaacctccatctcccgggttcaagtgatactcctgcctcagtcgcccaagtagctgggattacaggcatgcaccaccacgcccagctaactttttgtatttttagtagagaatgggtttcaccatgttggccaggctggcctcgaatgcctgacctcaagtgatccacccatctcggcctcccaaagtgctgggattacaggtgtgaaacaccgcgcccggccaaaaccatttcattttgtactttatgattattcttttctttttgttttgccgtgttgcccagtctcgtctcgaactcctgagtttaaacaaccagcccaccttgcctcccaaagtactgatattacaggcgtgaaccagcgtgcccggcctgaattgtatactttatttaattaaatttatttatgtatttgttttgagacagagtctctgttgcccaggctgcagtgcagtggattgatctcagctctgcctcctgggttcaagtgattctcatgcctcagcctcctgagtagctgggattacaggtgtgtgttaccacacccagtaaaaaattttttctatttttagtagagatggggtttcaccatgttagccaggctagtctcgaactcctggcctcaagtaattcgctctccttagcttctcaaagtgctgggattacaggcatgaaccatggcacccagccctgaattgtatactttaagtgggtacttttatattacgtggatgacatatcaataaaaaatataaattaatgcaaaactcagcatattgccctgtggattggccaagatcaaagagatggatcaagtgtagacccagagaatgtggttttctcttgccattgatgaagtgtaggttggtaaaatatttttggaggtttttttttgaaattgactctgtgacatctattaaaggatgaaatgtgtatagtaccctttgactcaatgattttttttgagacagggtcttgctctgttgcccagattggagtgcagtggagtcaatcgaaactcactgcaacctcgaactctggggtttaagcgatcctgcaacctcagcctcctgagtaggtgggactacaggcaagtaccaccatgtccgggtaattttcttattttattttattttctttatttgttttgagatggaatttcactcttcttgcccaggctggagtgcaatggcgcgatctcagctcactgcaacctccgcctcccaggttcaagcaattctcctgcctc[132 bp omitted]ctcagcctcccaaagttctgggattacaggtgtgagccaccatgcctggccaattttcttattttatttatttatttattgagaccgagtctcgatctgtcacccagactaaagtgcagtggctctgcactttaatgcagatatcggctcactgcaacctctgcctcctgggttcaagtgattctcctgccttccgagtagctgggactacaggcgcctgccaccacatctggctaatttttaaatttttatttaatttttattttatttttagtagagatggggtttcaccatgttggccaggctggtcttgaactcctgacctcaagtgatccgcgcaccttggcctcccaaaatgctgggattacaggtgtgagccaccgtgcctggcctcaatgttttattgtaagagacttatcctgggaaaatacttgctccgctgtgaataagcgcagatatcagtgttcagtgtaacatttctttgaaatatcaactgagttaattggattaattcacgcccacaaattagaagatgattaatttgtggcagcctcagactatggaatgctaatgaaagtttaagaaagggatgaagtggtaaccaattagtaagaaatgatgatctttaatgtatttgttgttttgtttgcctggtggatgtctgcttgctgtttgctgaaataaatgtgtcttgaacacagagactttgttgggcttttttttccctcccaaatccccatgtctgtaataggaaaagctcaaaggtgctgagtaataatgtactaaatgattgagtttgtgttttccatatcaaatgctgtctcaggcacattgtttattttgaagaatgtacacatttaataagcacatacaaaaaatatatattatacatatacatattcttttttcttttctttttctttcctttttttttggagacagggtctctctctatcacccaggctgcgttgcactgtcatgatctcggctcactgcaacctctccctccttggctcaagccattctcccacctcagcctcccaagtagctgagaggacaggcgcatgtgccaccacatctggctaatttttgtattttttgtagagacggggttttgccatgttacccaggctgacctctaactcctgacctcaagtgatccatccatgttggcctcccaaagtgctgagattacgggtgtgagcacaatatatttgaatgaacaataaataacaacaaagataaaaactcctgcaaaagtaattacccagagatgacgcggaatgtctattttctctatttcctgctgtttataattattattttttaatggacaacctggaaaacaagaagcatttctggccttgaatgccaccctaggactcgtcaacaccctgcccacagaagtccccatgccttttctcgtcctgatgtgtcttcagggttggatggaatttctggagattcctcctggggctccccaggcaatggccaaattcctagagtcaggtggatggagggaggtcttctgaagcctggggcaagagtgatgtaagtgggaatgaagtcggtggaaaagt[131 bp omitted]cgaaaccctgtctctactagaaatacaaaaatgagctgggtgtggtggagggcgcctgtaatcccagctacttgggaggctgagttaggagaatcacttgaacccctgaggcagaggttgccgtgagctgagattgtgccactgcactccagccccggcgacagagtgagactccatctcaaaaaaaaaaaaaaaaaaaaaaaaaaatctattcttattt[165 bp omitted]tgcctcagcctcctgagtagctgggattacaggcgcccaccaccacgcccggctaatttttgtattttcagtagagacagcatttcaccatattggccagactggtcttgaactcctgaccctgtggtctgcccgcctcagcctcccaaagtgctgggattacaggcgcgtccagccttccatcaattcttcaatctcctcttttaccctatgcctgtgggctctgatggggttgacctcttggtggggttgactcatctttgctcctgcccccaagaggcccacagacacctccccatcctctgcattgtgagggtatctcttggtgcagggggagggggttcaggaggggcacatgggcaacaaggagttgtttgggctttgaagacaatattggggcagatcagagtgggggtgacaaaggcatgaggttggcctttgctttctagaatcttgttgttcaatgtctttctgacattggggttcctctcggtgtctggacattcattcttgaaacactgtccttgctctctgtttttttttttttttaattttattttttgagacaggatctctctctgtcacccaggctggaccgcagtggagtgatctcaggtcactgcaacttctgcctcccgggttcaagggattctccttcctcagcctccagagtagctgggattacaggcgcccgccaccatgcttggctaatttttgtatttttagtagagacagggtttcaccatgttggccaggatggtctcaaactcctgacctcaggtggtcagccctcctcagcctcccacagtgctaaaattacaggtgtgagccaccgcacctggccggccctgagtttaatttgaatgaatcaacaacatatattcaataaggtgtctttaaaccgaaacacgcatgaaccagggtgaggtattgatcgattgatgacaatagtgtgagcagagccttgtgggaccccaaatctgtatttcccctgggagcaggggttccttattggctgagaccatgttcatggcaacttttttttttttttttttttgagacagcgtctcactctgttgccccggctagagtacagtggcgcgatctcggctcactgcaacctccgcctcccggattcaagcgattctcctgcctcagcctcctgagtagctgggactacagtcatgcgccaccacgcccagctaatttttgtatttatagtagagatggggtttcacca[139 bp omitted]ctgcctgtatttatttatttttaatttcttttatatatattttttgagacggagtttcgctcttgttgcccaggctggagtgcaatggtgcaatctcagctccctgcaacctctgcctcctgggctcaagcaattctcctgcctcagcctcccaagtagctgggattacaggcacctgccaccacgcccggctaattttgtatttttagtagagatggagtttctccatgttggtcaggctggtcttgaactcctgacctcaggtgatccgcccacctcggcctcccaatgtgctgggattacaggagtgagccacccgtgcccggcctgagaactgtctgtatttattaagtgctcagtacattcaagggactgatctaggcacctccagagagttaacgggtgcagtccttgttctcagggaactcgttgttcaagtgggggaaggcaggcgttactcaaagaatcacagaataggctgggcgctatggctcatgcctgtaatcccagcaccttgggaggctgaggtgggtggattgcttgaggccaggagttcgagaccagcctgggcaacatagcgaga[131 bp omitted]gtgaaactctgtctctactaaaagtacaaaaaattagtcgggcatggtggtgtgtgcctgtagtcccagctacttgggaggctgaggcaggagaatcgcttgaacccaggaggggagattgcagtgagccaagatcacactgagacagaaattaaaagagagaaacagaataaagcaaaggttaagtgagaaacactgcacttcatcctgggccacagagtgagactccatctcaaaaaaaccccccaaaaccaaaaactaaacaaaaaaagcctgggcctggtggctcacgcctgtaatcctagcgctttgggaggccgaggcgggtggatcacttgaggtcaggagttcaagaccagtctggccaacatggtgaaaccccgtctgtactaaaaatacaaaaaattagccaggtatggtggcacgcgcctgtaatcctagctactcaggaggttgaagcaggagaatcgcttgaacccaggaggtggaggttacagtgagatgagctcacaccactgcactccagcctgggcgacagagtgagactgtgtctcaaaaataaataaataaataaataaataaataaataataataaataaaacaaccccccccaccccgccaaaattagccaggcggagtggcgtgctcctgtagtcccagctacttgggaggctgaggtgggaggatcgctggagtctgggaggttgaggctgcaatgagcagtgattccccgacctgcactccagcctgggcaacagggtgagaccctgtctcaacaaacaaacaacaaacaaaactccccaaaagcccacgacccccccaaaacacacaaaaaacaaaaagccacatgccaagaattaataagtaactctggatgagggaatcgggtccttgtagagaggggagttgttccagaattgcaggtggaggcactaggcactccggtgaccgtggcggcgagagtcaagctgggaagacactttccaggcgcggggagcaagatctctcagcctccaggtgccctctctgccccttggcattcccccaccctgcccctctgtctccccctttctctgttcctcagtttcccctcctcgttgtcccttgtggggtcccagtgtgtgagttgctttgtgtctacccccttccagggtctgacaagcagaaggagttttcattatatcctggcagtctgtcccccaacccccaaatcggatctaattctgctctgctgaggctggcctggcctggcctaagaggattggaacatttgctaaatgggactaggacagggtgagagaggcgtcgctggggagacccaggtgccaggacggccaccagggggcggcagaggacgagggagaccagaagacagaggggacagagaagggcgtggtgggggcggggtgggggtggggtggggagaggcagggagtggatacaggcatattccctggctgtttagggaaccacatttaaggggttagaagggtgccaacattgctgattttttttttttttgagacagagtcctgctctgtcagccaggctggagtgcagtggtgtgatctcggctgactgaaacctctgcctcctgggttcaaaggattctcctgtctcagcctcccaatagctgggaatacaggcacccaccactacgcagagcatattttcgtatttcagtagaggcggggtttcaccgtgttggccaggctggtctcgaactcctgaacttaagtgatctgttcacctcgacctcccaaagtgttgggattacaggtgtg[133 bp omitted]caacatagcgagaccctgtcttaaaaaataagaataaagtttatcattaacctctaccctgactttctactcactctcccctctctgttcctttagggataatgggggcctggagagtgggaaggggagtgcaagcatgggggtctggaggtgtctgatcaacgacctcagagatgacctgaggtttcctgagctgggaatgttttggaagggtctgaactgcaaggaatctttgcagagtcctggggtctacctctgatgtgaagcatcttgcattttggagctgtccaagtaaaacatgaaaaagaatttgatacagaattaaaaatacatttttgttttttctgagactgagtttcgctcttgtcgcccaggctggagtgcaatggtgtgatcttggctcactgcaacctctgcctcctggactcaagcaattctcctgcctcagcctcccaagtagctgggattacaggcatgtgccaccatgcctggctaattttgtatttttagcagagagggagtttcactatgttggccaggctggccttgaactcctgaccacaagtgatctgcccgtcttggcctcccaaagtgctgggattacaggtgtgagtcattgtgcttagctcaataaatagataaattatatatatatatatatatatatatatatgcaaatatatatatatatattttttttttttgagacagtcttgctatgttgcctaggctggagtgcagtggtgtgagttcggctcactgcaacctccgcctcccgggttcaagcgattgtcctgcctcagcctcctgagtagttgggattacaggcgtgcaacaccatgcccggctaagttttgtagttttagtagagatgggtttttaccatgttggtcaggctggtctcgaactcctgacctcgtgatccacccaccttggcctcccaaagtgctgggattacaggcatgagccaccgcacctggctcaaagaatactttaagtaaaattcaaaatcttcaaaagtgtttttaaaattccacgcttttaatttctacttcatgccaggcccagtggctcatgcctgtaatcccagcactttgggaggcccaggcaggaggatcacttgagatcaggaggttgagaccagcctgggcaacataatgagacccccgtctctacaaaaaaaaaaaaaaaaaaaagcaggtgtggtggtgtgcacctgtagttccagctactcaggaggctgagacgagaggatcatttgagcccaggaggttgaggcttcagtcagccgagatcacgtcactgcacttcagcctgggcaacagagcaagaccctgtctcaaaaaaaaaatgtaaaagaaataatttccaatacagtaagtagcaatagatatatagtcaatatcaacaaaagctctttgagccttcggttactttaaatttcaagagctggagaggaccctggagtgtttctttgggacttgggacaagtcttatttagactctgggtcatgtgtagcggggtagttgagggcacggttttgagaggcaaacacggctgacccaaatattgtttttctgtttatttatttatatttatatatatatttttgagacaggatcttgctctgttgcccaggctggcatgcagtggtgtggtgagtctcggctcactgcatcctccgcctcgcgggttcaagcaattctcatgcctcagcctcctgagtagctgggattataggcgcacaccaccatacagctaattttttgtatttttagtagagacggggttttgccatgtgggccaggctggtcttgaactcctgagctcaagcgatcctcccaccttggcttcccaaagtgctgggattacaggtgtgaaccactgtgcctggccttctttttaattttttaaaattatatttttttggcctccttcccctcctaatatattttattttgtagagatagggtctcactatgttgcccaggctggcctcagtctctaatccatagcctcaaatgatcctcctgccttggcctcccaaacccctgggaatttttttttttttttttttttgagatggagtctcacgccgtcgcccaggctggagtgcggtggcacaatctcggctcactgcaagcaacgcctcccaggttcatgccattctcctacctcagcctcccgagtagctgggactacaggcgcccgccac[185 bp omitted]aatgtgagcccagttttatacactggtggattatttgctattctcacttttgaaatgcctgtataagtcttctgcaacctggttgaatatcaggcattgatgttttatgatctcaaatggtggaacaagggagatcagtgtccttgccctggggatcagcctgggaggcccaaggctagttctcagagctgtggagttcggcacccactgggtcccaggttcccacctgagcagttgttctcacaggtaaggcctgaatgctcacagccaccttgtggtgcagacacacagataactccattctacaggcagggagactgagcctgggaaggagggaggtgcccacaggtcccagcttctcacacactgcatgaaccacagaccttgggaacaagatctcagggaacaataactccatggaaacttcctcccaggcggcttctggtatcatccccactttacagaggaggaaactgaggctgagagaagtgtagtctccagttctgtctcccacgtcagcggcagagccagagctgggccagcacctgccccggagcctgtgccctcctgatcaccaggtgatatggcctcttaggatgctcgccacagccccacggagctcagaggtccctttctcagaggaggaaactgaggctgagagaggtttcgtcaatttccgaggtcacacaggtgatgagtggaagaaccaggggtagaatttaaatctctttggcccccgagccccgctcttcacccccgagtctgcctgggattcctagaagatggatgaggtcagcttcctcccctgctcccatgggattcccagggctcattgtgacagcttgtcactgtatccactttgcagaggaggaaactgaggcccaggagcccatatgaagggcccaaggccacgcagtgagaaaacaacaggatttaaacccaaactcatgtggctccatgccagctcttggcaagaccctcccgactcagccatgttcagggccctcccttgttggccctgccagcctctctctgccgcatccgtaggctcctctgtccagtgaggacaaggagctgagtggatgcacccactaccaggcatgggacctggtagaagcagggattcatggcacagttagagcctgaatgaattaactcaggaacaatatgatccctgaagcatccagagattcaaacactagtgggcagccccacagtctgacctcacagtgctgcaatcacagacccttggtccttttgggaaaacatcacaccacttctctgtgccagtgtctctacctggttctgccccaccatccatccatccatccatccatcacccatccatccatccatccatccacccatccatcacccatccatccatccatccatccatccatccatcacccatccatccatccatccacccatccatcacccatccatccatccatccatccatccatcatccatccatccatccatccatccatcatccatcacccatccatccctccatccatccatccatccatccatccctccgtccatccatccatccatttctttcacatttattgaacacacacttactgctgtgtgtctgggacagtcctaggtactgggaatacagctgagaacaagacagacagggccccatcctcctgacaagggcagacaagaaacaagatgtcagtaagagttttgcaaaagattaaataggatgaatgtgttagggagctaagggggtgcaggtatgaggagcacccccatcctgcagtagagcctggagtgaaactcatcaacaacctgatccaaggatcctccagtattccatacatcttcagactgtccccagaatttaaccccactttttttgtttattatactttaagttctagggtacatgtgcacaacgtgcaggtttgttacatatggatacatgtgccatgttggtttgctgcacccattaactcatcatttacattaggtatttctcctaatgctattcctccccctgccccccaccccacaacaggcccctgtgtgtgatgttccccaccctgtgtccaagtgttctcattgttcaattctcacctatgagcgagagcatgcggtgtttggttttctgtccttgtgatagtttgctcagaatgatggtttccagcttcatccatgtccctgcataggacatgaactcatccttttttatggctgcatagtattccatggtgtatatgtgccacattttcttaatccttaaccccactttttccagctgcaatcatgtgcattacaataagtctcaaagtcaggtagcgtaagttctccaactcgttttatttttccaagactgctttgattattctagatcatttatattccatagcaacttcagaatcagtttgacaatcaatttctacagaaaaatcctgatgagattctgattgggattgcagtaaatctaaagattagtttgagaagaattgacctcttaataacattgagtcttctaaaccatgaacatggtatagttcactattgacttgagtctcctttaatttcttccagcagtgctttatattgtttcagtaggataatgatctgatagaagagatgacaggacttatggatggattggatgtaagtggtgaggagaaaggggttaggggccaggctgagtgcccagatttctgcctgagccactgggtggagatgagaaggaaagcaagttgcctcagaagacctagctcagagaagaagtgcttggatttgatttcagcttacttgatcccagggccatgtgcaggaccagctgaaacccacctctctgtacccccacccctggaaggactctggatccaggagccaaccagtacccagattccccagggcaggtgatttaagagttgctgacaccttctctgtcccgctggaagttattttctcctccctctccctgtacagctgaccttccttccctgctgcagggccagggggtctgttccaggactggattctcccatcaggagcctctggactggtcgccgagggtcagacggcccctccctctcttgctgtcatccctggctcttcaagctaatgagacctgtcctgattcctcagccaggcctgtagccttaatctctcctagcagggggtttgggggagggaggaggagaaagaaagggccccttatggctgagacacaatgacccagccacaaggagggattaccgggcgtgtgtgtgtgtgtgtgtgtgtgtgcttgcgtgcgtgtttgggtgcacggggaagtgaaacagacccgtgtgggacccaggagctcagggacatattaatatctagagagacagacgagaggagagagacacaaagagggccagagaccaggaaaatcagaaatacagagcaacagaggtaccaagacagggagaaggacagaaatgaaaggaaatcctcccagctactcgggaggctgaggcaggagaattgcttgaaccggggaggtggaggttgcagtgagccgagatggtgccactgcactccagcctgggtgacagagcaagactctgtctccaaacaaaaacaaaacaaaacagaaatgaagggcaatccagggagaggggaagcaagaatcagagagagagagagagagagagagagacagggaaaaagagaaggaggaacagagattggagctgcagaggataagcgaggacagagggacagagatgaggctggagttacagggacaggtggacaggcagaaagacagcaaagggagggacagacagacaggaacagaaggacatggaggctgagggagaggggagaaagagcaagatagacagggagacacagagaaaaagaataagagagaccaaggggataatgcaggtttatcaacagagacagggacggagaggagcagatggagaatgaaagagtggtattcaggaaagtaggcagaaatgccacagcctaaggcccacaggaaaagaaactgaggtacagagaagccagacaaagaccaatggtgtgtagagagatggtgagtgctgggtttgttggctcacgcctgcaatcccagcactttgggaggccgaggtgggaggattgcttgaggccaggagtttgaagccagcctgggcaacatagagcgactccatctctacgaaaataaaaaaattagctgggcatcgtggtatgtgcctgtaaagtctcagctactggggaggctgaggagggaggatcccttgagcacaggaggtcaaggctgcagtgagctgtgatcatgccactgcactccagcctgggcgacagagtgagaccctgtctcaaccaaaaaaaaaaaaaaggaaaaaaaaaagaaaaaaatcccaaaccccaaactccaccaaaaacagaaaaacaaaacaccctttctaataagtctgcctattttcagtgctggaagcagcccctgccacctccgcccccaaaaagaggagaatatcatgtctgacaacacagagacagagaggccacagacaagacttgaccaagtcaaagagagagaaacaggggaaactgaggcagaaaccgagaccaatgaggcactacagagataaactagctgtcggacagactgttgtggagagaaagggggacccaggagagggatcccgaaagctccgtgcctctcttttttcagacgatctctcaggaccatctgacagtgctctccttcctctttgatgcctctctcttgggatactagctgaagctggagagacaccagttagacctaaggaaggacttccctgaggagtaggggcttatggtcaccggcaggagctggggcctcccttccccatcagccctaattgccaagatgtcatggggggaagaggaggggattaagcagacgggtgcccctccccctcccagccaatgtcacctcctggtgcccagtcgagtcccccaccttggccgggattaccctccgagttccaggccatgacaaatgacatcactcccggcccaggcttaaaatctccccatgtgaggggatgtgtttccttcagcctctgctgtctggccgctctgtctaggtcctgggccacgggagagccccgtccctcctttctgaaggtgagcgtctgcaggagaggcggaggggaccgaggaggggagaaaaaagagaggggagaagttgggtttatcttattcgtggctgtgtttgccgtgctctgcaggtgatgtttgctgaatagtcacacacaaaacagaggtgccgtcctggcatttgtggaaacggggctaggctgtgattgcagcaggagggagtaaggttagacagcagggactggctgatggcactcggggcattgggaggattcagggtggcttgtgggcaagggggtcccctcaagccctgacggcatccggggttgggggcttctcaccgtggttctaaggcaactcctcagcataccgctctgttggatgttctttaaaactcttagcactgcctgaaattttcatttgcgcgatgatccacaaatggcctgtctccctcccttgttgagcactgatttttccccagtgcccagcgtgtggttgggatttgcctaaatatgtgttgcatagatggatggatgaatgacagacaagggacggaacagacatatacgcagagagcccaggtctgtggctgcaacaggaagaactccgggtggacttgggcctgcccgagagagccaggaatgtgatgactggggatcactgtgctggtgaattgatcacttagggcctcaatgcacccagaggctctggctttcagcccaggctctacttcgggactggggaatcctcacgcccccgccctcttagcttccagcacagtcactctctctgatcttctttctgcaaagtttttttttgtttgtttttgagatggagtcttgctctgttgcccaagctggagtgcagtgccacgatctccactcactgcaacctctacctcctaggtccaaggagtccatccacctcagcctcttgagtagctggaattacaggcgcgtgcccccatgcccagctattttttgtatttttagtagagatggggggtctctccatgttgtccaggctggtctcgaactcctgacctcaagtgatcagcccgcctgagcctcccaaagtgctgggattatgggtatgagcctctgcgcccagccggtctcctgcaaaactcttgattgacaccttgtttcccgtctgcccctgtcaggagggctgaggccttgtctgtcttgctctcggctgtattcccagtgcttgggtcagtcctagacacacagtgagtgctcagtgaatatgcagggaatgaatgaatgaatgaagggcagaagggtagaagcaggtagacagactgccacagagaggaggtgtgatgcggttttcccaaaaggaacgagcgagggctgtgattgccacagagtgaggtccgacttcagggctgcccactgtgtgtgaatttctggatgcttcagggatcacattgttgatcacggagttgatttgctcaggctctaactgtgccgtggatcccagcttcccccaggtctcatggccggcagtgggtgcatccacccagctccttgtccccgctggacagaggagccaacagaggctgcagagagaggctggagtggctgacaagggagggccctgaatgtggctgagctgggagggtcttgccaagggctggcatgaagccacatgagtctggttttttttttttttttttgagacggagtctcactctgtggcccaggctggagtgcagtggcatgacctcagctcagtgcaacctccacctcccaggttcaagcgattctcctgcctcagcctctcaagtatctgggattacaggcgtgcaccaccatgcctggcttatttttgtatttttagtagagatggggtttc[143 bp omitted]cttggacccctcatgtgggctctctgggccttggttgcctcctctgcaaagtggggacaatgataagctgtcaccatgatccagccagatgagccatattgcaggcctggcctgcagtgggagcagggcaggagaccagcctcattctgtttctagggtccctaggtagacttgggggtgaagagcggggctcgggggccaaagagatttaaattttacccctggttcttccactcatcacctgtgtgacctcgggaattgacgaaacctctttcagcctcagtttcctcctctgagaaagggacctctgagctccgtggggctgtggggagcatcctaagaggccatatcgccgggtgatcaggagggcaccggctccggggcaggtgctggcccagctctggctctgccgctgacgtgcgagacagaactggagactacacttctctcagcctcagtttccttctctgtaaagtggggatgataccagaagccgcctgggaggaagtttccatggagttactgttgcctgagatcttgttcccaaggtccatggtgcatgcagtgtgtgagaagctggggccccctggaggtccttaaggtcatcagccacctgaactgtgggcacctccctccctcccaggctcagtctcccccgctgtagaatggagttatctgcatgtctgccccaccaggtggctgtgagcattcagacctcacctgtgggaacaactgctcagctgggaacctgggacccagtgagtgccgaaccccacagctctgagaatcagcctggggcctcccaggttgatccccagggcagagacactgatattctttgttccaccccttgaaatcataaaacatcagtgtctggaaattgttgtcattgtgagatcttgtatataaagcctgggccaagtgtctgccgagtgatgaattcctggacattcttttttttttttcctccccaggagacaggtcctctttcgattgattgattttttttttttttttttgggatggagtcgtgctctgtcgcccaggttggaatgcagtggtgcaatctcagctcactgcagcctccgcctcccgagttcaagagatttttgtacctcagcctccccagaagctgggacaacaccatgcccggctaatttttgtatttttagtagacggggtttcaccacgttggccaggctggccttgaactcctgacctcaagtgatccgcctgcttcagcctcccaaagtgctgagccactggcctggcctgttttgttttgttttgagagaggatcttgctctgttgcccaggctggagtgcagtggctggatcatagctcactgcagcctccaactcctgggctcaagcgatcttcccacctcagcctcccagagtgctgggattacaggtacgtgccaccacgcccagccctcactggaggcccttctgtcatcagctgcctcaggttgctgccaaacccagggaaagatttcagtggatgttcaatattattattgttattattctctgctgacatcttgtctaggcagcactttatcattattatcagctgtttgatctggggcccacactttcctcctgctgagcctcctctcccctatccgttaaaagggatgatcctggccaggcactgtggcccacgcctgtgattccagcacttagggaggccgaggtgggcggatcacctgaggtcagaagtttgagaccagcctggccaacatggagaaacccaatctctactaaaaatacaaaaaaaaaattagccaggcatgatggcacatgcctgttgtcccaggttgggaggctgaggcagaagaatcgcttgaatccgggaggtggaggttgcagtgagccaagattgcgccactgcactccagcatgggtgacagagactccgtctcaaaataacaacaacaacaaaaacaaaaacccagaaagtggtgatcgtaaatgtgagctttcttggctttcctggaaggttaactgcttagccaggcaatctgactcagatttgacggcgaagacaatgaaagtgtgtgcttttgttccaggccctgcaaatggtccccagtggggcaggttcaccagtttccttgtctccactctctggaggttcatatttaacattattggtttttggagaagtgggagaggacagagggaacccaggttagggggctgggggaataggaccttcaggaattactctagccttgaaatcctggattctccactgccagcctgtgtgtgatcccgggtaagtcacactttcgagcctgaagatgttctctaaactgtaagcatcaggcaaaagcagtgtctcatgcctgtaatctcagcaatttgggaggctgaggcaggaggatctgctcaggccaggagttcaagaccagcctgggcaacatggcaagacacctctctctacacaaaaatttaaaaaattagctaggcgttgtggcacacctgtagtcccagctacttgggaggctgaggtgggaggatggcttgagctcaggaggtcgaggctgcagtgagctatgattgtgccactgcactccagcctgggtgacagagtgacatgctgtccctaagaccaaaaccaaaaccaaaatgtaagcatcatagtaatacagtctctacctcccaaggttgtgctggggatttaatgactacctgtatagagaaggcttgtgtattagttaactattgctgggtaacacttatcctaaaattgagcagcttcaaacaataaacatttctgatctcttatagtttccaagggacaggaatccaagagtggcttaactggattattccggctcagggtgttccatgtggttgtggtcagatgtcggccaggactgaagtcacttaatggcttggctgaggctggggaactaacctccatggtagcttactctcatagctgttggcaggaggcctcatttctttgccacatagacctctccgtgggatggcttgagcatcctcacaacatggcggctggctttccttagagctagccttggaagccacgctctgtcatttctgcaatatcctgttggttacacacgtcagccagcttgttagtagggactacacagggcatgaatatcagggggtaaggattattgggagttaccttggaggcagtttgattttggggatttaatgtagctgcttttgattttattgtcagcactgagccttctcgtgacattcctaccaggttttacttgttctttctgcttttctccatgatcaatctgctatggtcacacagggtgccttgtttcttctccaacaagaccaagttggagaccctgtcttgctcagggtgacggtgtgagattccagcctccaagcctttgcacctgctgtttttttaattttttttttttgcctggaaatctctattccagatccacacaaattcctagatgcctcacccaccccaaatgccttcactctcataacaacctgttttattttcctgggagttcttgaaactttctgaaggctttttttttttttttttttttgacagagtcttgctctgttgcccaggctggagtgcagtagtgccatctcagctcactgcaacctccgcctcccgggttcaagcgattctcaagtagttgggattacaggcacccatcatcatgtctggctaatttttgtattttagtagagatggggtttcaccatgttggccaggctgatctcaaactcctgacctcaagtgatcctcataactcagcctcccaaagtgttgggattacaggcaagagcccctgctcctggccatggcatct[154 bp omitted]tctactaaaaatacaaaaattagccaggtatggtggcaggcccctgtagtctcagctacttgggaggctgaggcaggagaatcacttgaccctgggaggcagaggctgcagtgagccgagatcaagccattgcactccagcctgggggacaagagtgagacttcatctcaaaaaaaaaaaatttttttttccttgtttgttattggtttctctaggaacggaaccaagaagttcaattctatgagaacagagaagctgcggtcttatttcttcctatattcctagttcctagagcagggaaggcattcaaaaaatatttactgaatgaacagtagaatctcaacttaaaataaacagaatctgtccccctcctcatgtgagggatgagaaggaaaggacagtgagaggaacggaagagtgggagctcacaataaacaccatccatttttaattctttttcttatgtttcaaatatttattgggggtgctggggacatggcaggaaccgagatattaccagtccctgaactcaggtaactgatagaatttgagggagagagatagataaacaaacatataaatatgtcgtttaatacaagctgtgtcttgaagaaaaggaggtagggagcgtgtgtgtgtgtgtgtaaaatccagtttaggggcgtaggttgctttctctggggaaagtagctgagctgagacgtggaggagaaggggttagctggtgagaggggctttggggtgggggagaggcgttcctagcccaggaaacggcttatgcaaatagctgtggagggtgagaggttttctgagtccatcctaatgagggcaatgaggaaccctcagagggttttcatgttctgtttgcttttttgaagattttattgttgtttttgcttttgacaagaacacacacacacacacacacacacacacacacacacacacacacacacaattaaaaagtaatccaaactatagagacaagatatggctttagcattccttcccagaggcagtcactggtgccagtagcttgcttccttcctgggaattttctacgcatatacaagtgtatattctacacatgagtaaaatcaatgcctcattttgtttattaattcataattataatacttattatttttgagatggagtctcactctgcctcccaggctggagtgcactggcataatctcggctcactgcaacctccacctcccaggttccagagggtctcctgcctccgcttcccaagtagctgggattacaggcatgcaccaccatgcctggctaatttttgtatttttattttattgtatttttatttttaaatttactttattattatgactctttttttgagatggagtttcgctcttgttgcccaggctggagtgcaatggcgtgatctcggctcactgcaacctctgcctcccgggttcaagtgattctcctgcctcagcctctggagtagctgggattacaggcgcccaccaccacgcctgcctaattttgtatttttagtagagacagggttttgccatgttggccaggctggtcttgaactcttgacctcaggtgatccatctgcctcggcctcccaaagtgctggcattacaggcgtgagcaactgcacctggcctatttattgttattattgagacaaggtcttcctctattgcctaggctggtgtgcggtggcatgctcatagctcactgcagtctccaaatcctgggctccagtgatcctcctgcctcagcctcctgagtagctgagactacaggtgcggaccaccatgcctgaccaatttttgtatttttttttttgtggagacagcgttttgccatgttacccaggctggtctcgaactcctgggctcaagcaatctgcccaccttgacctcccaaagtgctgagattataggtgtgagacacagcacctggccatctgcattgttttaaaaatcacaaatggttgcgaggtatacatactgcccagcaccatacttgtttcctttgaatatataaatattataattttataatatttataatatataataacacaaataataataaatatatatggtttggtcatatacaatatataaaataacattcacaaacacttattgtcaaagtgcaattaaatgggaaaaaaagaaaaacatttggccaggtgtggtggctcatgtctgtagtcctagcactttgggaggctgaggtgggaagatcacttgagcccaggagttggaggctgcagtgagctatggcaacgccgctgcactccggcctggatgacagagggagaccttgtctcttaaaaaaccccaaaaaacaaatctgattctctgacgcatatataataagcacaggtcaaagatttatttaag[136 bp omitted]tggtgaaaccccgactctactaaaaatacaaaaattagctgggcgtggtggcgggtgcctgaggtcaggagttcgagaccagcttggctaacaatggtgaaaccttgtctttactaagaatacaaaaaattagctgggtgtggtggctcatgcctgtaatcccagctacttgggaagctgaggcaggagaataacttgaacccaggaggtggagtttgcagcaagccgagattgtgccactgcactccagcctgggcgacagaacaagactccattaaaaaaaaaaaaaaggagaatttgatgaacagaagttgataggtttagtcaggaaagacgggctggagaaaatttgccaggttagatacaaaactggttaaagacctacaggacaatacaactgtaacctttgaggttaccttttctaccagagagaaatcatttgcaaccaaacttcctggggttaccatttaccttgtcgaagtctagactctaatcaataatgaataacagaccgggtgtagtggctgacgcctgtaatcccagcactttgggaagc[134 bp omitted]gaggcaggagaatcgcttgaacccaggaggcagaagt[133 bp omitted]cccggtttgtagtctgttaggcatggggttgcacagctggtgagcaagcattactgcctgagccccgcctcctgtcagatcagcggtggctctagactctcacaggaacgtgaaccctattgtgaactgcacgtgcgagagatctaggttgtacactccttatgaaaatctaaggcactgcccactcccatccatggaaaaattatcttctacgaaaccagtttttggtgccaaaaaggttgaggactgctgccttggaatatgaagcaaactttgggtgggtctgttagacaagactcccagatgacttggaaatggcatgctgtcagctttttttgtcttattgccgagcctagaactttttttaatttttattttttttgagatgaagtcttgctcttgtctcccaggctggagtgcagtggcacgatctgggctcactgcaacctctgcctcccgggctcaagcgattctcctgcctcagcctccagagtagctgggattacaggcgcctgccaccacgcccggataatttttgtattttagttgagacgtttcaccatgttggccaggctggtctcgaactcccgacctcaggtgatccgcctgctttggcctcccaaagtgctgggattgcagatgtgagccaccacacctggcccctagaacaattttttaaaactatataatggagatcttttaaaatcagttcagagagcagccttatgttttttttttttttttttgagacggagtctcgctctgtcgcccaagctggagtgcagtggcttgatcttggctcattgcaacttctgcctcccgggttcaagcgattctcctgcctcagcctcccgagtagctgggattacaggcacgcgccaccatgcccggctaatttttgtattttctgcagagacggggtttcaccatgttggccaggctggtctcgaacttctgacctctggtgatctgcctgccttggcctcccaaagtgctgaaattacaggcatgagccactgcgcccaggcttactttaaaaaaaaaattaattttttgtagagacaggagagtttcgctatgttgccacctgaacataaatgctattttctttttcttttcttttcttttttttgagacggagtccgtagcccaggctggggtgtggtggcaccattttggctcactacagcctccgcctcccaggttcaagcgattctcctgcctc[134 bp omitted]tggtctcccaaagtgctgggattacaggtgtgagccactgcgcctggcccataaatgcgattttcattcccattttccaacaaggcgactgaggtatacattgaaggtgaattactaggacaaaagaaagatggcattttacttcaataacagtttgttacaacctgtactgctacctatctgccatgggagtgtgcctttccccacactgacaccagtgctggaagttatcaacctccttcatctttgccaacctgataggtcaaaagtgatcatggaagatccacactcgctttttttttttttttttttttgagataggggtctatttctttttcttttttcagagatggggggtctcactatttctttttctttttttcagagatgggggtctcactatgttgcctaggctggttttgaacttctgggctcaagtgattctcctgccttgacctcccaaagtgctgggattacaggtgtgagccgccttgcttagcccttactg[142 bp omitted]ttctcctgcctcagcctcccaagtagctgggattacaggcacccgccaccacacctggctaatttttgtatttttaatagagatggggtttcaccatg[137 bp omitted]accaatccagtttgcctgggaccattctggctctagcactgaaagtcctgtgttccaagaaacacccacctctcctccaacctgggcaaagagggacggttggtcaacctgcagtcctgggttataagtgaggctgagcgtgtttgcccatggtcaagaaagaagggatcttggatgagggtgtgtaacaggatcagatttgttttgtttttttcttagagtcttgctgtgtcacccaggctggagtgcaatggcctgaacacagctcactgcagccccaaactcctgggctcaagtgatcctcccacctcagcctcctgggtagctgggattacaggcatgcatcaccacacccagttaactttttaaagaacactttttttttttttttaagagacagggtcttgctatgttgctcaggctggtctcaaactcctgggctcaagtgatcctcccgccttggcctcccaaagtgctgggatgacagatgtgagccattgtgcctagccaggacgagatttttagagggtagagtaggaataagagcttgcacttatgaggcacatgatggcttcagctgtctgctttgcagagtctcaagaaagctctgagaaccttaagcagaggccattttacatgtgaggacacagaggtacagagaggtgagataaatggccaaggtcacatacctaagaggagaaggaggcaggatttgaatcgcagcctgcacgtcaccccatggtgagtaactggtaagtgagtgagcatccctcctcttctcttgcaggccccctgacttgggcctcagtgtccccgaagatcatgatggcgtatatgaacccggggccccactattctgtcaacgccttggccctaagtggccccagtgtggatctgatgcaccaggctgtgccctacccaagtgagtacagtcgtttctcttggcaccccaggctggcctcatctcttggaggacctctggggtccctttgcccccaggaagaaggcaatcacaggggcgacttcagggccatacaccagccctctgggttcatctgaaatgtatgtcacttagaaaaacattagcagtcctagaaattcaggacagaggttccttttggggtgaggaagaggggatgtaatctggaaggggaatcaagaggaattttcatctgttaccaaaactttattatttatttatttttcagagacaaggtctcacactctgtcacccaggctggagtgcagtggtggtggtcacggctcactgcagcctcgaactcctgggctcaagcaatcctcccacctcagcctcctgagtagctgggactgcaggtgtgagccattgtgcctaggcccggggggcactttttttttttaattttatttttgagacagggtctcactctgttgcccactctgaagtgcaatggtgcaatcacagctcactacagcctcgaactcctgggctcaagcgatccttttgccttggcctcccaaatagctaggattacaggtgcacgccaccatgcctggctaacttttttaagtttttgtagattttgcaggatctggattatacaaaacatagaaaaaattattattatttttttttttgtagagattgggtctccctatgttgcccaggctggtctcaaactcttgggtccaaataatccgcctgactcagcctcccaaagtgctgggattacaggcatgagccactgcacctggcctgcaaagccttatttctttttctttttttttctttcgagacacagtttagacggagtttcgctcctgcccaggctggagtgcaatggcgcgatcttggctctttgcaacttttgcctcccaggttcaagtgattctcctgcctcagcctcccaagtagctgggattacaggcgcacaccaccatgcccggccaatttttgtaaagccttatttttaagagaagtgagtactcagttatttgtagcattattctttagctcttgtttttttttttttttttttcaagaccgagccttgttctgttaccaggctggagtgcagtggcataatcttggctcactgcaacctctgccttctgggttcaagcgattctcctccctcagcctcccgagtagctgggactacaggcatgcaccaccacacctggctaattttttgtatttttagtagagacaggggttccccatgttggccaggatagtctcaatttcttgaccttgtgatctgcctgcctcagcctcccaaagtgctgggattataggcgtgagccaccgcacccagcccagacttgctacttttataggctagaaacggttgaatgtcagcaatgtcatgcttcaactgattatgtcttagtgcataagaaagtttagaagagggaaaaacgactcgcacacctccttgttgagctaaagccttggggtcaggcatgagccacagagtgccaggcacacagtgaggtgtagaagggcagggaatgtgtattccatccttagtttaggcagatggcaaccaggatggaattcttggcatcccacccagcctcagggcctcacaccagcccatgtggatgacctgagggtcctgtttcccatcccaccccaggcgcccccaggaagcagcggcgggagcgcaccaccttcacccggagccaactggaggagctggaggcactgtttgccaagacccagtacccagacgtctatgcccgtgaggaggtggctctgaagatcaatctgcctgagtccagggttcaggtggggtggtgggtccctggacccctcccgacacttcctgtgatctcaggaggcctgcccggaacaaagagtgatgggaggagggagagatcacagagtgacagccaaagttataaaggggacaataatccctctccccaccatcccactgaccgcctcatggctctcattgcccctcgctcctctccagctgcgctggccctgacctgcctgccaagcaccctcctgccttgggcctttgcactcagtttcctctatctggaatgcttatttccagataaccacacagcaggccccatcgccttgttcgagtctttgcttatccatcagtgagacccacactgaacacagcatttaaaattgcatatgatttacatatggtatctcagagtctgtttatttagactctgtctctcccaactagaatgtcaattccactgacggacactcagagtagtagaaaatggttaatacatgtttattaactgactgaatagacggatggatggatgggtgggtggatgcatagatgaatgtatgtatgtgtgactgtaggtgtgcgtgtgcatgtatgactggaagcatggatgagtgtatgtatgtgtatatatgagtgtctgtgtgtatgatgggatggatacatgtatatatgtgtgtttgcatgaacgcacataggtatgattagatagatgatgaatgtatgcatgcatgatatatgtatacgtggtgtatgtgcacatgtatgt[137 bp omitted]tgcctcagcctcctgtgtagctgggattacaggcgtgtgccaccacaccgggctaatttttgtatttttagtagagatggggtttcaccatgttggccaggctggtctcaaactcctgacctcaggcaatcctactgcctcggccttccagagcgctgggattacaggcgtgagccaccgcgcccggccggatgggtgtatttatgtatatatgagtgtatgcatgtatatatgattggactgataaataaaatgtgtgtgttagtatgattgtatataggtatgactggatggattaatgtatatgtatgcatgatgtatgtgtgtatgatgtatgggtgtataattgtatatttgtatgtttgtataatcagatggatggatgaacatgcatatgatgtatgtatgattagatagatccattaatgcatgtatgatgtatgtgtgtatgacctatgtttatataattatatgtataagatggatgaatctatgtatgatgtatgtgtgtacaattgtatgtatcatcagatggataagtctatgtatgatgtatgtatgatcagatggactggtgaatgtgtgtatgacatatatatgtgtgaggtatgtatatatgatcagatggatgtctacataatgtatgtgtgtatggtgtatgtatgtataattgtatgcgtgtatgtttgtatgctgtaggtatgatgttacatatatgtgcatacacacgtgtgtatgattggaaggataaatgaaatatgtatgtttgtgtgattgtatgcacatatgattagatagattagtgtgtagctatgtatgctgtatgtgtgtacaatgtatgtgcctataattgtatgtttgtatgtctgtatgatcagatggatgaatatgtatatgatgtatgtatgatcagatagctggataaatgtatgcatgatgcatgtgtgtatggtgtatgcatgtataattgtatgtatgtttgcattagatggataaatgcctgtaggtatcatgtatgtacgcatacatgcatgattggatgactggatgggtttatttgtgtatatatgagtgtacgcatgtatatataattagatggataaatgaaatgtgtgtctgcatgattgtatgtatggattaatgtgtatatatgtatgatgtatgtgtgtacaatgtatgtatgtataattgtatgtttgtatgatcagatggatggatgaatgtgtatgatgtatatatgtatgatcagatggctccattaatgcatgtatgatgtatgcgtgtatgatgcatgtacacttgcatgtatgatcagatgagccagtgaatgtatgtatgatgtatatgtgtatgatgtatgtatgtatgatcagatagatgggtaaacgtatgcatgatgtatgtgcgtatggtgtatgtatgtataattgtatgtgtgcatgtttgtattagatgggtggatgaatatgtgtatgatgtatgtatgatcatatagatgggtaaatgcaggcatgatgtatgtgtgtatggtgtatgtatgtataattgtatgtgtgcatgtttgtattagatggatggatgaaaatgtgtatgatgtacgtatgatcatatagatgggtaaatgtatgcatgatatatgtgcgtatggtgtatatatgtataactgtacgtgtgcatgtttgtattagatgggtggatgaatatgtgtatgatgtatgtatgatcatatcgatgggtaaatgcaggcatgatgtatgtgcgtatggtgtatgcatgtataattgtacgtgtgcatgtttgcattagacggatgggatgaatgcacatgggtatgatgtatgcatgtgttcatgcacacatgcaggtatgattggatggatagatggatggatgggtgaatagacgccccacagctggatgcaaagtagacagatgtgaacccagcacctctcaccaataagtgtcctcatccccgggcaccctgcggctctcctgggcctcttccccacttacccacccccatctccgctcttatcccccaggtttggttcaagaaccggagggctaaatgcaggcagcagcgacagcagcagaaacagcagcagcagcccccagggggccaggccaaggcccggcctgccaagaggaaggcgggcacgtccccaagaccctccacagatgtgtgtccagaccctctgggcatctcagattcctacagtccccctctgcccggcccctcaggctccccaaccacggcagtggccactgtgtccatctggagcccagcctcagagtcccctttgcctgaggcgcagcgggctgggctggtggcctcagggccgtctctgacctccgccccctatgccatgacctacgccccggcctccgctttctgctcttccccctccgcctatgggtctccgagctcctatttcagcggcctagacccctacctttctcccatggtgccccagctagggggcccggctcttagccccctctctggcccctccgtgggaccttccctggcccagtcccccacctccctatcaggccagagctatggcgcctacagccccgtggatagcttggaattcaaggaccccacgggcacctggaaattcacctacaatcccatggaccctctggactacaaggatcagagtgcctggaagtttcagatcttgtagaggacgcagtctccatctctctccatcgggcctcgggaccctttctcttctgaatctgcttccctgcagtttagatcccgggatggcattcctgagaaagcaacccgaaccagctgtccttctgacagctcggtgttcagcttacagagaccacccctttcctccacagggagaggctcctccctctcctgggacagctcacaggtcctagtgattctctcaaccctaacaccgtctggcacgattgtgaccgctgaagtacaccacgagctccaggcttcagaaagtggtgctgagaacttgctccaagaagaagtcaaaccaaacttgcagttgatttggggtcatgtttaggtcagaatcaccgtgcccttgaacaagcaggtaggggggcttgataacttaactttccacgtggacagaatttttttttttgttttgtttttgttttgcagacacagtctagctctgtcgcccaggctggagtgcagtggcacgatctcagctcactgcaagctctacctcccgggttcacgccattctcctgcctc[177 bp omitted]cccggcccttttttttttttttttttttaattgagacggagtctcactcttttgcttaggctggagtgcagtggtgtgatctcagctcactgactgcaacctccacctcccgggttgaagcgttgctcctgcctcaatctcccaattagctgggattacaggtgtgctccatcatgcccggctaatttttctattattagtagagacagggtttt[133 bp omitted]tagggacctttctagaaattccaaagacagactttaagaagccccgtcgggaaaccttaggccaatgatgtggttacattaaaaataaattatctgggaatttcacagacttcacaaatgtcaggcttacatggtaggtttaggggaccgtttgagagacaaagatctacattcatatatgtagctatacatatatgtactttttcttcttagtttctttttaaagacattttatcactcattcgctcattagcacattgggaatgtgtgtatttggtagggaaatgaaaggcaccttgcctgttccatctctactccttttttcttttgttttaggattttctaaaggtgagacactggtggaactggggtagctgcttgggacgtaccacctatagttgtggctatttcacagagaagcagcagctagacagactcccatctgtaaataaacaagagataggaagagggggaaatagatttggaggaggcagccctacatttcaaacatacattcccttttttagatttttttttttttttttttggttttcagttttgatggtgggattggaaaatagagcttggcttgaggacattttcctggggtggcaccattatttcttgaaatagaatcttacttatggtgacactggcaagcacttgtgagaacctgaagacggattgaggtcatttgatgctcagaagttgggtgctgggtccctgccttctcagtccgagttctcctttcatttttgggtggggaggcgggttccaagagcccttcattggtggagttcacaaggcaaggtgtaaaaaaaaaagtagggcaggaagacagtggtgtgctggcagaggtctaacaatgggctctccaaggaagaggaaaaggttggttgtggagtgtttgtcagtttccgtggtgtaaatactcccaccacggctgacttcaagctagcaaccggaggtcactgaactaagagttgggaagagatagggcacaatatatgcttacgagttggtacacaccgtcagcagcagccagggtcaggagaaaggcgagatgtgaagagaggccgggaggtatcagatgacgtttccagcactagaccagaagaggtgcacacagcctagaccccctgaggggtacaccctgatctctagagcccacaaagaggtttttattcaacataaaacgtgttcatctctca[159 bp omitted]tctactaataatacaaaaattagccgggcatggtggcacgcgcctgtaatcccagctactcgggaggctgaggcaggagaattgctggaacccgggaggcggaggttgaagagagcagagattgtgccactgtgctctagcctgggtcacaagagcgaaactccgtctcaataataacaacaacaaaaataacccaggagtggctcaagagtccagtgtgggatgaaaatataaacagaggaagacaacatatgtcactggggaggctgggggagctagacaaaattcacacgggaggggcagggatgagacaatattgtgccctgggtctgtgcaaacgttgggaccagaatccactataagtttcattcttcggagacacggaagctctgcactggaggccgggactcaggcgtggaagagaatcttctccttattcaccggggaggctgtgtcttgtgcaaacaagtcatagaaacttgatgggagttggggagggactgaaggatgcatgcaaggttctgggaaggagtgagaagtagtgaaggccaaggggcccccatcacaggccgatggggtaagacttcgagagagcctgatcctggggtcttctgagactccaccaggagccggagagggcagggagccaaatccagctaggaggttacagattgcttttcctgggctgggctcctgagtgttggttcttccagctgtgcacaggggatttcaaacgttctacgtcctaaagccaggaagagtgacaaggcaggtggggacagaaggaagaagccaggagcctccctgagaaggtgtcaccttatctgtcctcctcttccccacacactggcctctgggtcccccttctctgtccacccacagagtgaaaccaattaaaatgttggatctcatttaaagtctgggtgattctttagtttccgtgttttctccaggaggggcaggtagaaacaggaactactctgttccttctgtctgtggggcctgggtccctccatgtgtttcctgtctcatcaccctcctttccttgacatctctctaaagccaatttatgaaggatcaggggctgggtgcagtggctcacgcatgtaatccagtgctctgagaagctgaggagggaagattgattaaggccaggagtttgagaccagcccaggcaacatagcgagatctctgtctctacaaaaaattaaaaaaatcaaccgggtgtggtgatgtgtgcctgtggtcccagctactcgggaggctgagatgagaggatcggttgagcccaggagtttgaggctgcagggagctatgattgcaccactgcactccagcctgggtgatgcaacaagagaccctgtctccaaaaacaaaaaataaaaaaaaaaaaaaaagaaggaggaggaggaacaggggtccccagggccagccccagccccacccatctgtaaccttccaatgcccctcccgaaaaaacaggggggtgacgagaatgctccctgcctcagtggcaggatgtgaagcttaacgccagcatttagagccacgcgcagcctctggcccgccttccctctcagcatccagccttctgcagcttcagctcttccacccctttgctttccatctcttcccccggatgcttttcagtttctcaatctcacccttgctctgtcatctcttctcctctctctctttccattcttcctcttgcctttcagactcccagctcctcatttcatttggatggattttcacctttttctttctttccttccctcttgtctctttttctttgctgcttacttttttctgactttctttctttctttctttttttttttgagacagggtctccctctctcacccaggctcaagtgcagcagcgtgatcttgaatccctccagcctctgcctcttgggttcaagcgatcctgttgtatcagcctcccgagtagctgggactacaggtgcctgccactacacctggctaattttcgtatttttagtagagacaaggttttgccatgcagcccaggctggtgtcaaactcctgggctcaagcaatccacctgtctcggcctctcaaagtgctgggattataggtgtgaaccaccatgactggcccacctctgagttcttgtttttccagctctaggtcatttttttttttttttttggagacagtgtctcgctctgtcacctaggctagagtgcagtggctcgatctcagctcactgcaacctctgcctcctgggctcaagcgattctcctgcctcagcttcccaagtagctgagacttacaggcgtccaccaccacgcctggctaatttttgtattttttagtagagacgaagtttcaccatgtttgccaggctggtctcaaactcctgacctcaagtgatccacccccctcagcctctgcaagtgctgggattataggcctgagccaccgctcctggcctctaggtcatctctctctgcctgtattcctctcagttgctgaatcccaggttaagatttttgttgggggatgactgggagttatatacaggagggagggtcaggcagacttgctgtccgagcttggcttagcctcttctggtcgtctgacctcgggtgattcatttctcccagcctcaatttccccacctgtagcatggagcatctaaggagacccatctcaagagaacaaaatgatgttattctattaattatggacctgaagccgggtccagggtaagagctcaataaatatttatctattttgtggtaaaatacacatactataaaatgtaccacttttcccattgcatgattcttaattcattttttccattttaagttacttaattcagtggcattaagtacattcacagaagaagccagacacaaagaccatatattgtattatcctaattatatgaaatattcagaataggcaaatccagccaggcacagtggctcatgcctgtaatcccagcattttgagaggctgaggtgggtggatcacttgaggccaggagtttgagaccagcctggccaacatggtgaaactccatctctactaaaatacaaaaattagctgggtgtggtggtgtgtggctgtaacccaaggtactcgggaggccgaggcaggagaatcacttgaacctgagaggtggaggttgcagtgagctgagatcgcagcactgcactccagcctggcagcctgggcaacagagtgagactctggctcaaaaaaaaaaaaaaaaaaagaaaaggcaaatccgtagagacagaaaacgtagtggctgccaggggctggggtgaggggtgctgtgtggtggaatggggagtgactgcttaatgaatatggggtttccttttgggatgacgaaaatgttctggagcaatatagtgaccttacaattctgctctgaagtatatgccgcaaagaacggaaagcaggtgttcagacaaaaacttgtacgctcaaatttatagcaggatgattcacaatggccaaaagatgaagcaattcaaatgtctgtccacagaaacaaatgaggtctacccatgcaagggaatattgctcagccatgaaaaggaagaagcactgataaacacaacttggatgaccttgaaatcatcatgctaaatatttatctttctttttttttttttttttgagacagagtctcactctgtcaccaggctagagtgcagtggcgcgatctcggctcactgcaacctccacctcccaggttcaagcaattctcctgcctcagcctcccgagtagctgggactacaggcatgcaccaccacgcccagctaatttttgtgttttttagtggagacggggtttcaccatgttggccaggatggtctccatctcttgacctcctgatccacccgcctcaacctcccaaagtgctgggattacaggtgtgagccaccacgcccggctgctaaacgtttatcttaacctattattattattattttgagatggagtcttgctgtgctgcccaggctggagtgcagtggcgcgatctctgctcactgcaacctctgcctcccaggttcaagtgattctcctgtctc[134 bp omitted]acttatgctattcctggcagctttagtcataatggccccaagctgaaaactatccagacgtccatcagcaggtgaaggcagaaacaaaccctgatgcatccatacaaaaggataccctgagccaggcacgatggctcacacctgtaatcccagtactttgggaggcctaggtgggcggatcgcttgaggtcaggagttcgagaccagcctggccagcatggaaaaaccctgtctctactaaaaacacaaaaattagctgagcgtggtggcacgtgcctgtaatcccagctacttgggaggctgaggcataagaatcgcttgaacccaggaggcagatattgcagtgagctgagattgcgcaactacactccagcctgggcggcagagcaagactctgtctcaaaaaaaaaaaaaaaaaagatattcctcactgatgaaaaggaatgaactcccagtagtcaataccccaggaaaagaaactagggctgggcacagtgattcacacctgaaactccagcactttggaagactgaggtggaaggattgcttgagctcaggagttcaagaccagcctgggcaacagagtgagaccccatgtctttaaaaaaaaaaaaaaaaaaaagaaagacagacaattaaatccaggctgggcacggtggctcacccctgtaaccccagcactttgggaggccgaggtgggaggaggatcgctttagcctgggagttccagaccagcctgggcaacatagtgagaccgtgtctctactaaaaaaattcaaaaaattagctgggtatggtggcacatgcctatagacccagctacttggggtgctaaggtgggaggatcgcttgagcccctgaagttgggactggagtgagctgagattgcaccaatgtactccagcctgggcaacagagtgagaccctgtctaaaaaaaaaaaaaaaaagaaagaaacgaaaccagaaacaaagaagcaaatactgctgaaataaataaataaaaataaaattttttaaaaaagaagcaaatattgtacaattccatgcctatgagattctagaaaagataaaacttatacagggcagagagcagatagtgcttgccaggacctagggagcagctggtgagatttactgcaaaggaacaaatgaggatcttttgggggtgctagaaatgtgccctatcttgattatggtgatggttctgggactgtatataattccccaaacttataacaccctagaaaacaaatgtatttcaataagagagtgaacagggagtcaggtaggctgggtgcggtggctcatgcctgtaatcccagcacattgggaggccgaggagggcggatcacctgaggtcagaagttcgagaccagcctggacaacatggtgaaaccccgtctctactaaaaatataaaaattagctggatgtggtcacgggtgtctgtaatcccagctacttggagggcagaggtgggagaatcacttgaacctgggaggcagaggttgcagtgagccgagaatgtgccactgcactccagcctgggcgacactgagactcttatctcaaaaaaaaaaaaaaaaaaaaaaaaaaaagagagttggggaaaaaacagaatggattttataggacataaattataccttagtaaatcagaaggaaaagaaaataaaattattgagcaggcagtggtgtaagccggttctaactcttttaatcctcagaatgatactatttttatgatccctatttcacagatgaggaaactgaggcagagggcggctgggtgacctgcccaaggtcccaagctaggaggggatggacccagtcttgatattcatcttgtcaggtggccagcctccttgctggtctctgtcccctccattttctgtccttcattttattcctgttctcgaatttttatttatgcatttgtagagatggggtcttgctatgttgcccagtctggctttgaactcctgggctgtaaatgatcctcctgcctcggcctctcaaagcgctgggattacaggggcaagccactgcgcctgaccgccactcgtgttctcttctctcttgttttccccttcctaggtctcaacggtgagtgattctctcccctcgttccctctctccgtctcttccctcacccccgtatgtgtctgtccctcctggtctccaaacaccctcccttcccccagctgtttcctctgcccctgaccaggactaatttagcaaatgctccaatcctcttatggcaacagcccagcctcagcagaatggcaggggaattagcgaggattaggttcagacgcatgacccgtgggggaggggactttggggagttttaacgaaacgatgccccctcctcctcccctcctatcccctccatggaaaagcactcgtgcctggggcacacaatgatgataaaatcacggctaaacccttcacggtgcgcctcctatgtgccaggcactgttaagccccttcactcattgaaacgtcggtgcagctccctgagggaggggccgtgcccctccctggatttaaggatcaggagaggttaattaactttcctgaggcaaatgggatccaatctcagccttcttggtgcttctcaggttaaagatgaaaaaacactggagggaagtaaactgaatgggcctgggggtcacaccgcaagggggcgcagcttctgtttgggtaacttcgggacgattttttatttatttattttttttgagacggagtcttgctctgtaatggcgaaatcctgcaacttccgcctcccgggttaaagcgattctcttgcctcagcctaccgagtagctgggattacaggtgtctgccaccacgcccggctaatttttgtattttttagtagagacggggttttgccatgttggccacgctgatctcgaactcttgacctcaggtgatccacccgccttggcctcccaaagttttagcctccgtaaagtgtggaagagagaagagagagagagagagagagagagagagagagagagagagagagagagagagagaaagaaaatgcatttcagaggagaaacggaaagcagggtggaggaagagattaggtgggaacagaacagacaaaacagacgccaggaggagctgaaggacgttatccaccggccacattcatacctcactgtgcaatttgcaatacaaaggacaccatgggaatccagctcctgacatgcacctggggcgctgggaaagacaatgactgtgagggagggataattaaggacagagtgaggggacgggtgggcacggaggccgacacctgtcatctcagcactttgggaggccaggcaggaggatcgcttgaggccaggagtctgaagctgcagtgagtcatgatcgcgccactgccctccagcctgtgcgacagagcgagatcctgcatctaaaaaaataacaaaaaacctcactgtcaacagagtaaagaggcaagtcacagaataggagaaaacatttggaaatcacacattttttaagggattgataatcagaatatacccactcctaaaactcaacagtaaaaaaaacaaaaaaccctgatttaaaaatgggcaaaggacttgaactgacagtgctccgagaagatatataaatggtgaataaacactcaacagtctggccaggcacggtggctcaagcctgtaatcccagcactctgggaggctgaggcgggcagatcacttgaggccaggagtttgagaccagcttggccaacagggtgaaaacccgtctctactaaaaatacaaaaattagccaggcacggtggcgggcacctgtaatcccagctacttggagggctgaggtgggagaatcgcttgaacctgggaggcggaggttgcagtgagacgagactgcaccactgcactcctgcctaggtgacagagcaagactctgtccccctccccacccccaacccctggcaaaaacaaacaaacaaacaacaacatcaacaacaaaaacacacacaaaaaaagacagaccatgccaagttttggtgaggatatggagtaactgaaaatgtaaactggtaaaaccgatttggaaatctgttcagcgttatctataaaatttgaacaaatggcttctctgtgaccccaaaattctacttctagtattgtactaacagaaatgcatacatggctgggtgcggtggctcacgcctgtaatcccaacactttgggaggctgaggagagtggattgcttgagtccaggagtttgagaccaacctgagcgacatagggagagcttatctcaaaaaaaagagagagagagagaaagggagggagggaaggaaggaaggaaggacacacctgtgtaatcactacccagagtgagaaacagaatattcccagcaacaccaagctgtatgagccgtgactgcaccactacacttggtttgtgaagtttcctcaaccaatgttttacttcagtgcccctataggtgggccagaaaggagacattttccagagaaaacctgaggcccagagcagtagaggaaaaagcggctattttctatgaatttgggaaaaagaaactccattcccaagacaaagggaatgtggtctagagagatcagagaaaggaaccaattttctaaaaacaggatagaccttattttattttattacttttttttttttagatggagtctcattctgttaccaaggctggagtgcagtggcacgatcaggactcactacaacctctgcctcctgggttcaagtgattcccctccctcagccacccaagtagctgggactacaggtgcacgtcaccacgtgtagctaatttttgtatttttagcgcagacaggatttcgccttgttggccaggctggtctcaaactcctgacctcaagcgatccgcccaccttggcctcccaaagtgctgggattacaggcatgagccactgcgcctggcctattttacttatattttgcatcgttaaaaaccctgcaccgtggggaattcacagtgcatgccatgaaaattgtccccagccccatggcggcccttccatggggctaccattctcagcagcttcctgtgtgtcacccttcatgcctgctgtgcatttgggagcaaaactgcctatgtcttgttttccaatttctacactttcatattatgtttatttttatttttatttttttgagacagagtctcgctctgtcacccaggctggagggcaatggcgtggtctcggctcactgcaacctctgcctctcgggttcaagagatcctcctgcctcagcctcctgagtagttgggattacaggcgtgtgccaccacacccggctaatttttgtatttttagtagagacggggtttcgccatgttggccaggctggtctcaaactcctgacctcaggtgatctgccctcctcggcctcccaaagtgctggtatcacaggcgtgagccactgcacccggctcagtttctacactttcttatctctttactttgttcctcaagcatggttcaagaaacttctgtgctttctatttttatttttttaattttttgagacaggttcttgctgagttgccctggctggagtgcagtgatgccaccacagcttactgcagccttgacctcccacactcaaatggtcctcccacctcagcctcccgagtagctgggactataggcatgcaccaccacgcccggctaatttttgtgtttctggtagagatggggtctcactttgttgcccaggctggtctcaaactcctgggctcaagcgatccccacaaccccctgcctcagcctcccaaagtgctgggattacaggtgtgaggcattgcgcctggcctccctttctttcttttccttcttttctttctcttctcttttcttctctttctttctctctctgtttctttcttttactttctttctctctctcccttccttccttccttccatccttcctttctctctccctctctttctttctttctttttttaaatagagtctcattctgtcacttaggctggaatgcaatggcacgatctcagctcactgccacctccgcctcccacgttcaagtgattctcctgcctcagcctcccgagtagctgagattacaggcacctgctacccacgccagactaatttttgtatttttagtagagatggggtttcaccatgttggccgggctggtctcaaactcctgaccttgtgatctgcctgccttggcctcccaaagtgttgggattacaggcgttagctaccgtgcctgtcttcctatttttttttcttctccccgctgcgcccccccgcgacgcccggcttcccaagctcatgatgtcttcctacttctgcacctctctcttattttgttttctgggaataacatttgagctcctccaaggtctgatgccatccggccctggctcaagtctccatccttcctgccctggcttgccgccctcttcctgtccctaaacaaggcaagctctgagacagaggccaggtgtggggctgaggtggatagagaggcttgccgctgagctgaccatagccactctcaaagtgtggttcctgctgcttctcagtggcgtcagcatcacctgctaatcagaaactgaaattctaggggtgagacccagggatctgggttttaaggagctcttcaggggattctaatgccaactagaccttgaaaattgctggcttatggctgggcgcagtggctcattcctgtaaccccagcactttgggaggctgaggtgggcagatcacctgaggtcaggagtttgagaccagcttggccaatgtggtgaaatcctatctctactaaaaatacaaaaatttgccaggcatggtggtggccgcctgtaatcccaggtactcgggaggctaaggcaggagaatggcttgaactcaggaggcggaagttgcagtgagctgagattgcgccactgcactccagcctgggcaagagagggagactctgtctcaaaaaaccaagaaacagaaaacaaaaaattaaaaaagaagattgctggcttaaacttggtgcattggtgggggctggggaggaggctggttttcaaggtaataacgtttgatcagtatctcttgcagggaggaggtgaggtgaggcagggccactagtgacattgccctggggacaaacttgcagggactggggaggattctccaaaccaggggagccaggggagggattagggagagttctctgttccaggtcccctcctgagcagatgtcatgataagagatgcctgaatccacccaggcccattgtataggtggggaaactgatcctggagggaggaaggcttttgcccaaggtcagacagctgataatgatgaggacctccagggcttcccagctgctctgagacactgtgcccagaatgttcagtacaagggagttggtgaaatatcagaaagagaaaagcagcccccaatggccaggggctggccttgcactcacagccaggcctccatgctctctctttggatagaagggacttcaggccgggtgtggtggctcatgcctgtaatcccagtacgttgggaggctgaggcgtgcggatcacctgaggctgggagttcgagaccagcctggccaacatggcgaaaccccatctctactaaaaatacaaaaattagccgggcgtggtggcgggtgcgtgtaatcccagctactcgggaggctgaggcaggagaatcgcttgaacccaggagacagaggttgcagtgagccaagatcgcaccactggactccagcctgggtgacaagagtgaaactccatctcaataaataaataaataagtaaacagataaacattattaaaaagagaggatttcataaaacacaatgcatggtgcaagaactggatttaaacaaagaaacaaggacaaacggacaaggttattctttgtgttgccctgagctctctgtaatcatgtctgaacccagagagttcaaaccacaaaaacatgttgttcaaaccacaaaagagatccgtgtcctcctattctgtcgaatacaagtgacactgtttctagacaaaaaccctagttctgggcactcctcatcctcctcactttcaaggtaagagaatcagagtgaccctcttttcctgacagcatcgaacccagagcaaaaccacttttcttatttgttaaaactgcagtaaaataggcataacatacaa[133 bp omitted]ctgcctcagcctcccgagtagctgggattacaggtgcccgccaccacgcctggctaatttttgtatttttagtagagacggagtttcaccatgt[132 bp omitted]tcattctccccatccccagcccttgggaacctctaacttattttctgtctctatgaatttgtctatgttagatatttcttgggagtggactcatacaatatttgtcctggcttatttcatttagcataaatactctctaggttcatggaggttgtagcctgtgccagaacttctttcttaaggctgaagaatattccattgcatggatagaccacattttgttcattcatttgatagacatttgggttgtttcagccttttggctattgtaaaagatgctgctatgaacattagtgcacaaatatttgttcacttccctgatttaaattcttttttttttcctgtttttaaacattttttttagtttgcattcttttaggtataaaagtcactctgttttgaatcctttccaaaattatcaaacaagctcaaatcctataacatttgccattaaaagcaagggcagccgggcgcggtggctcatgcctgtaatcccagcaccttgggaggccaaggtgggcggatcacttgaggtcaggagtttgaaaccagcctagtcaatatggcaaaaccccatctctactaaaaatacaaaaattagcttggtgtggtggtgggcgcctgtaatcccagctactcgggaggctgaggtaggagaatcgcttgaatccgggaggcagaggctgcaatgagccaagatcgcgccggcaacagagccagacaccgtctcaaaaaaaaaaaaaaaaaaaaaaagcaagggcaaaagccacaattcctttcacatcaatctaaaacatcctttcaaacaccctcttactgagaggccccaaaggttccctttgtgttcctccttcttgcaacaagacaataaacccaactttgcttgactactggtgtccctctgatggtcttcagctgatcaacattgacaggtttcaccaagtcagtcttaaaaaccaaccacctgggcatggtggttcacacttacaatcccagcaatttgggaggttgaggcaggaggatcgcctgagcctgggagctggagatcaggctgggcaacagagcaaaaccctgtctctacaaaaaataaaagaaattagccgggcatggtggtgggtgcctgtagtcccagcaacttgggaggctgaggtgggaggattgcttgagcccatgaggtcaaggctgcagtgaccttgacctgttgccactgtactccagtctgggcaacagagcaggaccctgtctcaaaaccaaaaatacaaaacaaaaacaaaaacaaacaacaacctatgctccaaaaccatttctggggaaataatcagattccctacccgttcacctacgaagcccagctagagtctctcgtcttaatctttgccaatcgaatacacaaagttttttttttttttttttcacagagtctcgaattgtcgcctgggctggagtgcaatgctgtgatctccactcactgcaagctctgcctcctgggttcaagcaactctcctgcctctgcctcccaagtagctggggttacaggcgcccgccaccacgcccagctaatttttttgtatttttttgtagagatggggtttcactatgttggccaggctggtctcaaactcctgacctcttgatccgcccgcctcagcctcccaaagtgctgggattacaatcacgagccaccacgcctggcctcaaatatgcaaagttttacatttaatttattttagaaattatagagagggggaccatctactcacatcttatagaccaagaaaactgtgagatcattcctgttgacagcagggccatcatctgctttggtgaataatgtgttcccagccacctaaaagccgaacaaaatgtgcaattatggtaaaatgtttccagaaaggaagcagaatatagatacaatgatggaagaatgccacagtgagatactaagcaaccttttaagagcgtgcagggaacttgtaaacataccatctatttgttttataatttatttatttatctatttccaagacagggtctctactctgtcgcccaggctggagtgcagtggtttgatcatggctcactgcagcctcgaattcctgggctcaagcgatccacccccctcagcagcccaagtagctgggactacaggtgcataccaccacacctggctagttttttgtttttttttaaaatatattttgtagcgataaggtctcgctatgttgcccaggctggtctcgaactcctggcctcaagtgatcttccccccttgactcccaaagccctgggattacatgcatgagccaccatgcccagccactatttgttttgtttcagtttatatttatttatttatttattttgagacagagtttcactattgttacccaggctggggtgcaatggcacgatcttggctcatcacaacctccacctcctgggttcaagcaattctcctgcctcagcctcccgagtagctgggattacaggcatgtgccaccatgcccagctaattttgtatatttagtagagatggggtttgtctatgttggtcaggctggtctcgaactccctacctcaggtgatccacccacctcggccttccaaagtgctgggattacaagcgtgagccactgcgcccggcagaactttcttatatttaaatgtctatcttcacaaaatagtaccagtgagcttgttcatctgcttatgtctttattggccaaataaatagccacggtgcaaaatctctgtggtcactactgtgttcccagcatgtcctgtagatgaagccggacaatgtgtgcaatgaggaatcattgctggggatgctgctttctacaatagaactctaagtagcaggtgaaaacaatgagcgaggcccgtggtaacaatgtctacgttttattgaattttgaaattggttgcatgagtcatttctttttctttttttttgggagggggccggagtctccctctgtcacccaggctgcactgcaacctctgcctctcaggttcaagtgattctcttgtctcaacctcccaagtagctgggattacaggtgcctgccaccaggcccggctattctttttgtagttttagtagagacggcgttctgccatgttagccaggctggtctcaaactcctgacctcaggcgatctgcccgcctcggcctcccaaagtgctaggattacaggcgtgagtcaccgcgcccagccttgcatgagtcatttttagctccctggatcatgagccttgtcaatctccttgacccctgaacccatgtgggtcctgctatgaggagatgagggcagccaggggtctgacacagcagatgcatctctgagggacctgacttgtgtgaaccaaggtaatgggtcccctgcatacatcagtagcagtccatggaaatgtccatcagacctgtgtcccctcctggttgggggagcaggaaacttcaagaatgactagtaggggccagagtggcctcaaaggaccaaagaggaggctgtggggtcatccaggagagagggatggtgactggacaaggcgggcagcccgggagccgggaggagtgggtagactcgctggcattgatcatgtggggccccagccctgggaaggaataaggatgactcctgggggctggctggcggtgcctctcctgagatggggaccccaaccacaggtcatgatgttgactcccccgatcccatgtggaataccacctcgcctgggctagggcccatgagggtgaaaccaaggctgtgttgtccactgaggttccccagctcctagcacagctcagcaggcagtacctgatcagtgatgagggattaatccaccattcaactcctccagggggcgggactgcagggcagggtgggaaacggagggtcctggcagggtgggccagggtgggcacagcagagaagtgatttaagagccaagcccttgtcagtacacacttgtgtttgggaacagatcaggactcaggatgcaagaccctggtcatctccaaggtgagcagggacagaggtgtgaggggcctgggctgatcctgtggctgaggctgcagagtgcaaatctgggcagccagagaagggctgggcctgtgcgggcggcttcctgtcctgcagacgggggagaacttagtggtgtctgggaaatgaaaaatcatgcagctgggcgcagagtctcacgcctgtgatcccagctctttgggaagccaaggtgggaggatcacttgagcccgggactctgaaaccagccgagccaacatagtggagacccgtctttagcaaaaatacaaaaattacccaggggtcgtggtgcacacctgtggtcccagctactcgggagactaaggcggggggttccttgagcccaggaagtggaggctgacttgagccgtgatcacatcactgcactccagcctgggtgacagagcgagatcccctccaagaaaaagaaagaaggaaagaaattaaaccatgcagttgagtggagcagaggactgggcaggtggcggctcccctgcaagtgtcagggtccctataacccttggatgggaggggacggggcagctggggagggctgagcaggcctgaggcagccccgtctgctccgaggtgaggcgcctacgctgcctgccttcccaggagctgttatcgcgcccatttcctagatgtggaccctgaggcccagagaggtgcaaggtctggtctggataccaggctgctatccgcggtgccgccccagcccacactgcctgggctcctggcctggcgcaggggacggggtccctaggggggctgggggctgcctgggggtttctgtgacctgtttccctcccacccccaggccctcccctggccctggaccctccaaggagacagcggcaggagcgcacggtctacactgaaagccagcagaaagtgctagaattttactttcagaaggaccagtacccgaactacgaccagcgactgaatctggcggagatgctcagcctcagggagcaacagctgcaggtctgacccccacccccaccccgcccgccccagtcaccccaaggagcctccccaccgctgtcactcaccggggcctggcccgcccgaccacctcccgccctgccacgcaaggggtcccgccagtgtagacccgggctgcatcctgagtcctgttccaactctatgctagcccaaactcgcccacatgatcggcccaggctgtcccccacggggtctcccggtgcccggacctcaggcacccgtgagaacccgcggtccctcccctggaaccctccctggccccccgggcacctgggcggcagacccggctcctcccctcccaccccaccctcctccccctactttcccctccctcttccctcccttctccaggcctgggagccgggggccctcatatggtgggtgcggggtgggggtgaacaccgggagagttttgaggccggcgccgcccccgagcggctcacccgggccgcgcgagtccctccttcacaccttctccctgtcccctctgccccccaggtgtggttcaagaatcgccgcgccaaactagctcgggagcggcggctccagcagcagccccagcgcgtccctgggcagagaggccgaggagcccgcgctgcgcccctagtccctgtagccgctgcctccttccctgggggtcctgagttcccgcagggcaggggttcctggatctcccctcagccgggcccctggggagtcctcccagcagcagaaccgaagatctacagcctcccccggacctggggtggccctgagtgtggaacacaggagggcctcaaggctgtcccggctccaggccctggcccaatcccagcccctatcccaggcccagcccagatcccaggcccagtcccaggcccagccccgaatttaggcccaatgtcaggcccactgtcagtctcgatccccggtccaataccagcccccatctcttgcccaggcccaatcccagacccagtcctaggccgaaccctgatgccaggcccaggatcactcccaaccccagccccaggcgccttgtggcctcagagcccctatgcctccaacttgtcgccagacacccagttataccctgacttcaccaagctgctcccgctcctagaccggttcgaggaatcctcactctccaccacgacgtctcagtacaaagaggaggatggcttcgtggacaaaaatcactcagtccccaggtcattactggatttatagggggcctgtgcctgcaaagttcttcagatcccagagggcctggagtggctgatctacactgctggtgactttctgcagtgaatgcatcaccctttacccaccctgctgcaggtggacatttgctgtcttcactgtgcagccatcacaggtggctctgctgtgaatgtgcctgcctgtcatttgaattgagcctgagcgtttctctgctgagactggagtcgctgctcactgggatgtttggcattagtggatgccgcttgagagctttgttaagggcttttcccagccctccttctggtcaatgtcctccccaacactgaggcttgtgagactttttaatgtttgtcgatccagtgacttgtggttttgttgtggttgtaatatccatttccctgatgattgagagattgagaaattctcatatgggtattaggcattttcaaatagtgactatttttcgtttttttttttgaatattttctcatttttattaaatagtgactattcatggtctttttggcccattttttgtagttgatttctttacaaatgtttataattttttttttttgagtcaaagccttgctctgccacccaggctatcgtgcagtggcacgatcttggctcactgcggcctctgcttcctgggttcaagtgattctctagagtctcagcctcctgagtagctgggactacaggtgcccaccaccgtgcctggctaattgttgtatttttagtagagatggggtttcatcatgttggccaggctggtcttgaactcctgacctcaaagtgttccgcctgcctcagcctcccaaagtgctgggattacaggtgtgagccactgtacccggccacgatgttttaaaataaaactccattgggagttaatattctgcgaggatctcctattatgtggttcgtcttcttgcttttgttaagtagatcactgtgcatagcattcaaaacattcatcagcagattcattcttcagtagaagaaaaaactcaatttaaaaatcagacttgatggacaaaaactgttataaaagtttattttttttttgagacagggtctcactctgtcatccatgctggagtgcagtggtgccatcttggctcactgcaacctccgcctcccacgttcaagtgattctcctacttcagcctcctgacttgctggaactacaggtgtgggccaccacacctggctaatttttgtattttttgtagagacaaggtttctccatgttgcccagacttgagctttcaagtttcttcaagaaaattgttggaattttaattggaatgacatgaaatttagaagtgtttttgggagaaattgaaatttttacaaagtctagtcgacctagtacttatttatattcattcaatcggtgttttac[140 bp omitted]ttgccccggcctcctgagtagctgggcttactgggattacagtagcacaccaccacgcccggctaatttttgtatttttagtagagatggggtttcaccatgttggccaggctggtcttgaactcctgacctcaggtgatccacccccgtcggcctcccaaagtgctgagattacaggcgcgagccaccgtgcctggctgaaatgttattatttaatcacagagctcttgcatgcatctttctgtagatttatttcttgcacttcatttttattattgtctgatattttacatggtattttaaatttcttattttaaaaaaatgtttgtcttgcacatagaattcagttgatctgtttattttgtttccaggaacctagttcaattcttttgaattctcataacttagctggacattgtaaatttaaaaatgaataaaacttcatggttactttgtggacattgattgctgctaagccgacgagtgcctctcctcagcactccacacccctctccgcgtctcgcttcctctgccgccccctagtggccatcctggccctgggtctccccacagcgggttctctgaccctgcctgtcctggtcccgtttagcaaatgctctaatcctcttaggccaggccagcctcagcaaagcagagagagaattagatcagatgttgggggaagggaggacggctgtgcgtgtgtgcgggggacagacttccaggatgtaatgaaagctcctccttatctagccgaccctggtagtaaaatacacacaaaaacaccggaacttcacaccagtcagactctgacagtgtgggaagagtagggaggaatctaatccatctattgtaggcgagggagcccctgtggacattctgggggcatgggggagaggtggtccagtctgactgtagattcagaatcacatcctgggcctaggggagggacggtggtgctccagggccctgcaggcatatcaatgaatggaaaatggattagtttattaatgaagatggaatttgcatgtgccctgattagctgaatagaaagtgaatggattaagtagaacagaattcctctctttttcatctcctcaattcttcttttttttggatacaggatttcactctgtcacccaggctggagttcagtgacgcgatgtcagctcactgcaacctctgcctccccggttcaagcgattctcctgccccagcctcccgaggagctgggattacaggtgcccgccaccacgcccggctaatttttatatttttagtagagatggggtttcactatgtttgccaggctggtctggaactcctgacctcaggtgatccacctacctcggcctcccaaagtgctgggattacaagcatgagtcaccaggccgggccacggattagtttgttaatgaatgaagatggagtttgcacatgccctgattagctgaacagaaagtgaatggattaagtagaacagaattcctctctttttaatctcctcaattcttcttgtttttggagacagggtctcgctctgttgcccaggctggactgcagtgatgcaatctcggctcactgcaacctccacctcccaggttcaggctattttcctgccttaccctccctagtagctgggattataggggctagccaccacgcccagctaatttttgtatttttagtagagatggggttttaccatgttggccaggctggtcttgaactcctgacctcagatgatccacccacctcagcctcccaaagtgttgggattacaggcatgagccactgctcctggcctcaattcttttttttttttttttttttggagacagggttttgctctgtcacccaggctggagtgcagtggtgtgatctcggttcactgcaacctccgcctcccagtttcaagcaattctcccacctcagcctcctgagtagctgggactacaggtgcatgccactgtgcctggctatttttttttttttttttttgataaagacagggtttctccatgttgctgaagctggtctcgaactcctgagctcaggcaatcctccagcccatgtctcccaaagtgctgggaccacaggcaggagccactgcccccggctatatcttctccattcaatttccctcctttttcacccaagcaagcagcccccttcactccctttggaaaccgaaaattccaagggaattttaccatctcctaggaagctctcccgcctctcctcatcatcccaggctgtgttctgggcatccccaagggaagcatctggacttctcactggaccaaggaagaggggacgaggtgacgttcagaaggcgggccttcgaaattccccatgtctgtcttggcaagagcaagaatttctcttgttttcctgcctgtagccaaaaagcataacaagaaaggattcagggtacgtatgagaacagttcattgtaccttcgacaaatgggtcaagttcaagctaatactgccctgcatgctccgggatggagatggaggcagtgcaggtagaaatgtcattgtcttgtaaggatcagagagagggggaaaagggccaattttttttttttttgtagagggagtctcactctgtctcccaggctggagtgcagtggctcgatcttggctcactgcaacctctgcctcccggattcaagcgattcccctgcatcagcctcctgagtagctgggactacaggcgcctgccaccaccaaacccagctaatttttttatttttatttttattttttgagatggagtctcgctctgtcacccaggctggagtgaagtggcgtaatctcggctcactgcaacctccacctcccgggttcacgccattctcctgtct[134 bp omitted]agcctcccaaagtgctgggattacaggcataagccaccaagcctggcatttttgtatattttgtagagacagggtttcaccatgttttccaggctggttttgaactcctgatctcatgtgatcctcctgcctcagcctctcaaagtgctgggattacaaagtgtgtgagccactgtgccaggccagaacctcttgctttaacaccctgcttcatcctaggtctctggatctagtttctgattttcttttttttttttcgagatggagttttgctctttttgcccaggctggagtgcaatggcacggtctaggctcactgcagcctccacctcctgggttgaagtgattctcctgcctcagcctcccgagtagcttggattacaggcgcctgccaccacgcccagctcattttttttttttgtaattttagtagagcagggtttcaccatgttggccagactggtctcgaactcc[133 bp omitted]caggctggtgtacagtggtgtgatcatagctcactgcaaccctgaactcttaggctcaagcagtcttctcatcccagcctccctagtggctgtgcctacagccatgtgccaccaagccaggctaatttttaatttttttcctgtagagatggggtcttgctatgttgcctgggttggtctcgaactcctgggctcaagctatcctcccatctagcttcctaaagcattgggattacaggtttgagccacagcacctggcctgccccatctcttaaaaaaaaaaaaaaatagtgaggttggtggggtggggcaccagtatgttttaaagctctgaggcaattccagtgtgcaaagcttgagtactgctgttctcagtcaaatccctgccatggagtagacagactcctgggagttgatgcctaactgtcattattaagaagacaccaaagccagctgtggtggctcatgcctggcatcccagcactttgggaggccgaggtgggtggatcacctaagttcaggagtttgagaccagcctggccaacatgatgaaaccccctctctactaaaaataaaaaaattagcagagcatgatggcgggtgcctgtaatcccagctactcaggaggctgaggcatgagaatcgcttgaactggggaggtggaggctgcagtgagccaagattgcgccactgcgctccagcctgggtgacagagcgagactgtctcaaaaacaaacaaacaaacaaacaaaactattttagtaaaagaaaactcaaaattgccttatctgattgtccctttcacagaaatccacctagataaaatcaaatgccataaagagaaagatgtgaatggtcattattttatttattatttatttatttatttttgagatggagttttgctgttgttgcccaggctggagtgcagtggcttgatcttggctcaccgcaacctccacctcccggttcaagtgattctcctgcctccgcctctcgagtagctgagattacaggcatgagccaccatgcccagctaatttttgtattttcagtagagacggggtttctccatgttggtcaggctggtctccaactcccgacctcaggttatctgcctgcctcggctcccaaagtgctgggattacaggcatgagccactgtgcccagcctgcgaatggtcattatttttataccaaataaatatagtagccaccagtaaattcattagttaaaaagggttttcagctgggcatggtggttcacgcctgcaatcccagcactttgggaggcctaggtgggtggattacgaggtcgggagatcaagaccatcctggctaacacggtgaaaccccgtctctactaaaaatgcaaaaaattagccaggcatggtggcgggcgcctgtagtcccagctacttgggaggctgaaggaggagaatggcgtgaacccgggaggtggaggttgcagtgagccgagattgtgccacttcactccagcctgggtgacagaaattctgtcttaaaaaaaaaaaagggttttcaaggccaggtaaggaggtggctcacgctttctaatctcgggaagccgaggtggaaggatggactgaacccagaagttcgagactggcctgggcaacatagtaagaccccgtctctacaaaaaattaaaaatttggccaggtgtggtggcactacctgtggtctcagctacttggaaggctgaggcaggagggaggatcacttgagcctgggaggtggaagctgcagtgagctgtggtggtagcactgcactccagactggatgacacagcaagaccccgtctcaaaaaaaatttttttccagactcccattttaacagactgtttctgccgggtgcagtggctcacgcctgtattcacaacactttcggaggccgaggagggtggatcacttaaggtcaggggtttgagaccagcctggccaacatggtgaaaacccgtctctactaaaaatacaaaaattagcctggcatggtggctggcgcctgtagtcccagttactcaggaggctgaggcaggaggatcgcttgaatccgggaggcagaggttgcaatgagctgagatcgtgccactgcactccagcttgtacgacagagcaagactccatctcaagaatatcccccaaaaacaacaaaaaacctcagactgcttccctgaaattcttctaaagaaaatgcctgacaggaaataacttaaggatattgtgggtttttattgttgctacttcgagatgcagttgtatctctagagacacagtggggtcagatcagagatggggttcattcaggggcacccccagaactgggagagtcctcggcttccacatacccgttatggtgctccgtggccaccagggggcaacaatacgtcactgttccagcccagggagcggccaaccagagcttggacctggggtgtcccaggagccacctagaccggctggttccttccatacaaaagacctccaggtgggatgggggagagacaccccacattcgagtgggagaaaaacatggaaaagacacagaggcaacattatatttctttccacttgtgtaatttaagctaaagccaaacagctagaaaatatactttttttttttttttttttggagacagtcttgctctgttgctcaggctggagtgcagtgataggatcataactcactgcaagctccgcctcccgggttcaagccattctcctgcctcagcctcccaagtagctgggactacaggcacccgccaccacgcctggctaatttttgtatttttagtagagacagggtttcaccatgttggccaggctggtctcaaactcctgagctcaagtgatccacctaccttggcctctcaaagtgctgggatcataggcgtgagccaccttacccggccttcttgttgtggttttaatttatatttctctagaggcaaatgatgcaaaacatcgtttcatgtgctgatttgccatccctgtgtcctctttggtgaaatgtttgttcaaatcttttattcttttttttcttttaaaagattatttgtttaatgctgggttttaggagttctttatgtattctagaaacaagtccattgccagatatgagatttacaagtacttcctctccatctctggtttgtcttcttgttttctcattttgttttgagatggagtctcactttgttgcccaggctggaatgtagtggcacaatctcggctcactgcaacctccgccaacacatctggctaatttttctatttttagtagagacagggttttaccatgttggccagacttgtcttgaactcctgagctcaagtgatccacctgcctcggcctccgaaagtgctgggattacaggcatgagccaccgcacctggcctatcttttcattctctttataggttctttggttcttttgcggaacaagactttagtttttttattttttatttttgagatggagtctccctctgttgcccaggctggagtgcaatggtatgatctcagctcactgcaacctccatctcctaggttcaagcaattctcatgcctcagcctcccgagtagctgggattacagacatgtgccatcatgcccagctaatttttgtatttttagtagagacagagtttcactatgttggccaggctggtctcaaactcctgacctcaagtgatccgccctccttggcctcccaaagtgctgggattacaggtgtgagccaccgcacctggccttatgaaagttttagaagcctccataaacaccgtttattgtatatggtttaacaacacagagtaagaggataaaattagattgcaaattacactccttaagatcagagcaataataaattgtggagatacatgtgatgaaaagaaatggaaccttaattgctcctgtaattttatttcttatttttattactaatttttgctctaaaatctgtcactgtagctatttcttatttttattaacaaacatttagacatccttttaggtagtacgtacattattcttgtagcattctgtaaacgggaaacattgcaaacatttaaaaaagtctgggatcccatgactcaactcactgcaacctttgcatccctgggctttgaaccctggttctctgaaccctagtcacttctttctttttgagacggtctcgctctgtcacccaggctggagtgcagtggcgcgatcttggctcattgcaacctctgcctcctgagttcaaacgattctcctacctcagcctcccgagtagctgggactataggcgtgcaccaccatgcccggctaatttttgtatttttagtagagatagggtttcatcatgttggccaggatggtctcgatctcctgaccccgtgatcctcccccacccccccgacctcccaaagtgctgggattacagacatgagccaatgcgcctggctaattttttttggtttttgtatttttagtagagatggggtttcaccgtgttagccaggatggtctcagtctcctgacctcgtgatccgcccgtctcggcctcccatagtgctgggattacaggcatgaaccaccgtgcctggccaaccctggtaacttttaacaaggaagggatcagagatgcagaggtttgatatttaaggtttcaggataaaataataagtcttacacaatgaccccagtcaggtacatgtacaaggacaggagaatcaatgtcattctccatataagatccagagtgttttggacgttattcccatgggaacagctctcgaggaagatctgccatcttctcttggaacaatttatcaaagtcttcagcttgggccactgtgaagtgatttttccagtccccagatacacctggaaacaagaagcagaaactcaggtcagaccacacatctccttgacctgtctccaccaggcacctgacatggacattgtagctaacatagcagaatggccgatggttcgtggtgggcctttatcctgcctggtcacatagttattcacctagctggaaacaatttcctattttctcctttctcccatccatcctgtgtacaattcctcagcaataacgccagtatatcatctgatatgtccagaatcaagtcacgtctcaccacctctgtttctaccacgttgactcaagccaacatcatttttcacctggattattagagtacacttgtaactggtctctgcttttttttctttttttttttgtagagacggagtcttgctctatccctcaggctggagtgcagtagcgcgatcttggctcactgcaacctctgcctcccgagttcaagcagttctcgtgcctcagcctcccgaatagctgggattacaggtgcctaccaccacgcctggctaatttttgtatttttagtagagatggggttttgccat[138 bp omitted]cagcatggcagccctcatgatcccagatcatgccacttctctgctcagattttccgaggactctaggtttcactcaagtacaagtgctggaggcgcttacagggctccaggtgatccagcccctgtggcttctctgagctcatcccctaaaactaccctctccgtcactctactcacacggggacttctgattctgcctcaaacgtggcaggcatccccactcctcagactattggcgtcccacgctccttctccttggaacgctgctctctcagattggcccatgacttgcctatttgcctctttcaagtctttattccaattcaagtttctcagcgaggttctctctcaccacccaatttagaggtcactccccatccttgctgtatttcgcctcataacacatatcatgtaggacaggttctgtgtattttctttctgtggtgtatgtgtatggtatgtatccctaatatagataagttatacaaagtctcagcatttatctttttttttttttttgagatggagtcttgctctgtctcccaggcaggagtacagtgttgtaatctcggctcactgcaacctctgcctcctgggttcaagcgattctcatgtctcagccccaccccaagtagctgggactacaggtgggcgccaccacacatggctaatttttgtatttttagtagaaacagagtttcaccatgttgccc[132 bp omitted]aaggatttaattcttttcttccacggaggactgtcccagatgtattagaactgtaggattttggaaaaatggatttttgttttgagccggagtttcactcttgttgcccaggctggagtgcaaatggcaggatctcggctcactgcagcctcctcctcccaggttcaagtgattctcctgcctcagcctcccgagtagctgggattacaggcgcccaccaccacacttggctaattttttgtatttttagtagagatgggctttctccgtgttagccaggctggtcttgaactcctgacctcaggtgatccacccgccttggcctcccaaagtgctgggattacaagcatgagccaccacgcctggccctggaaaaatggattctttcaccccatgcaatagacatttccattcatcttggcaccttacagcgtgtgatagcaaagtctctcttctctcccttttccaggtgaggcattccttcacacatttcttcatccaggacagatctctttttttttttttttttttttttttttgagacggagtcttgctctgtcgcccaggctggagtgcagtggcacgatcttggctcactgcaagctccgcctcctgggttcacaccattctcctgcttcagcctcccgagtagctgggaccacaggcacccgccaccatgcccggctaattttttgtatttttagtggagatggggtttcaccatgttagccaggatggtcttgatctcctgaccttgtgatccgcccgcctcggcttcccaaagtgctgggattacaggcatgagccaccgcacccggcccatccaggacagatctctatgctaactcaccagtggggcagctgcactgtggccatccccaaccccgtccttgtcctcatttctcaggtgaatcacagcttgtaggtctagcaagggttgctagttaacctgctcactgtctgtagaatggataatgctcatgtcacattctgaggaaagagaatctgaatgacctcacgtaagtcagataaccttcccgggcggaaccaattttccccacccacctacagcccacatcagtaccacaagaagaggctccctgctgaggccacgggagaagtgttc[132 bp omitted]aaaccatgtctttactaaagatacaaaaattagctgggtgtggtggcgtgtgcctgtaatttccagctactcgggaggctgaggcagaagaatcacttgaatcctggaggcggacgttgcagtgagctgagatcgcaccactgcactccagcctgggtgatagagcaagacttcatctcggaaaaaaaaaaaaaaaaaaagcactctttcatctcaactgttagcgcccagttgtgaccataggcatgcatgccgtgtattctggtatatttggaaaccagaggattttcttttaccttttctcagaagttgtgctttgtccactacataatcaacactcaggagggaataattggacatcttgttttctttcatgctctgaaaggagctgttcttgagaattaagttcagttcttcgggttctaacgtctttcccaggaattgacagatcttctctatggttcttcctgtgtcctaaaaaagaaaaatcaagagagaggatacgaaagagaaagacaaggctgggcgtggtggttcacgcctgtaatcccagcactctgggaggctgaggcggttggatcacttgagatcaggagttcgagactagcctggccaacgtggtgaaaccccatctctactaaaaatacaaaaattggcagggtgtggtggtgggcgccggtaatcccagctactcgggaggttgggggaggagagttgcttgaacccaggaggtggagggtgcagtgagctgagatcacgccactgcactccagcctggtgacagagtgagaccttgtcaaaaaaaaaaaaaaaaaaaaaaaaagacaatagaaaaaagtaagatgagaaggagggaaccgcagaatgaggaggaggaggaagaagagaggaacaacatgcagatgtgagaagggattgagttgaatgcaattaggagaaagaaagaaaaaaggtaaagaagagagggcatgaagtatgtaaaagatgcaaggatgggttgggcgccgtggctcctgcctgtaattccagcactttgggaggctgaggcaggcggatcacttgagtccgggagttttagaccagcctgggcgatatagtgagaccctgtctctacaaaaaatacaaaaattagccaggcatggtggcgcacagctgtggtaccagctacttgggaggctgaggtgggaggatcacctgaacccaggaagttgaggctgcagtgagctgtgattgcaccactgtactccagcctgggcgttggagtgagaccctgtctcaaaaacaaaacaaagcaaaacaaaacaaaacaaaaccaaccagaaaaccacaaaagatgcaaggatcatcgtggattttcccgtatggtagagtttaggacaacttaacagtaaaacacagagcctcgggtttcctaagagacgtttagagaggcttctagacagtaattagggttagcaaggagaggttcagggagaatctgatggagattgaaggcttgatttcaaatcctggctgtactgtcagatagtactgtttcccataactagcttttgaataacacacagagttttacaatatcttcttatatttcatctcaataattaggactaggtacatgatcctgggagattaatagatttttatttttaaaattttatttatgtatttatttagagacaagatctcactctgtcgcccaggctggagtgcagtggcatgatctcagctcactgcaacctccgcctcccaggctcaagcaattctcctgtctcaacctcccgagtagctggggttacaggcgtgcgccaccactcccggctaatttacgtatttttagtagagagggagtatcaccatgttggccaagctgggttccaactcctgagctcaggtgatctgcccacctcagcctcccaaagtgctgggattatggatgtgaaccaccgcacctggccaacaaaatggattattgtaaccagaaggactttgctttgaatcataggccttactcttagatctataatgctttaattttttcctctatttcataaaccttggttatctaataagaagatgtacaactatggaaataactaaaataagttcattgtgtgatccgaaaggaagatcccaggaaggtatgggatcgtgtatctgaggtagccaaccaaacttgttacaaagggcttcttaacagaaatgaaattcattccagcttggtcaacgtggtgaaaccccatctgtaccaaagatacaaaaattagccaggtgttgtagtgcatgcctgtaatcctagctacttgggaggctgaggcacgagaatcacttgaaccggagaggtggagattgcaatgaactgagattgcgccactgcactccagcctgggtgacagagcaagactctgtctaaaaaaaaaaaaaaaaaaaaagatggccgggcgcggtggctcatgcctgtaatcctagcactttgggaggcctacgggaggattgcctgagctcaggagttcgagaccagcctgggcaacatggtgaaaccctgtctctactaaaaatacaaaaaaaaattagctgggcatggcggcgtgcatctgtagtcccagctactcaggaggctgaggcagaagaatcgcttgaacccgagaggcggaggttgcagtgagccgagatcgtgccactgcactccagcctgggcgacagagcaagactccacctcataaaaaaaaaaaaaaaagaaattcatgcccagaccataggccatagaggattggagaggatgagccagaggaaggtgttgggacgtgacgtttcccaggtggtacaaaatccaatgttggtgttattttctcttttatgtgagatatcactaataggtcaagttcttttttttttttgagatggagtcttgctctgttgcccaggctggagtgcaatggcatgatctcggctcactgcaacctccgcctcctgggttcaagcgattctcctgagtagctgggtcctgagtagctgggactacaggtgcacaacaccacgcctggctaattttttatatttttggtagagatgggatttcgccatgttgcccaggctggtatcgaactcctgacctcaagtgatccccctactttggcctcccaaagtgctgggattacaggtgtgagacaccgtgcccagccttctttttctttctttttttttttttttgagacagggtctcattctgttgcccagcctagagtgcagtggtgtgatctcggctcactgcaacctcttcctcctgggttcaagtgattctcctacctcagcctcccaagtagctgggactacaggtgcctgccaccatgcccggctaattttttgtatttttagtagagatggggtcttgctatgttggccaggctggtctcgaactcctggactcaagccatccacctgccttcacctccccagtgctgggattacaggcgtgagccactgagcttggcctcaagttgttctttcaatacttgctggttctgagtatcatcggacagcttttcctctccgtcactattcactccagtacttggatctcagaatagtgagataaattgattacatgccttcatttctgttcataccagccaagctgagatgtcagacactcggaaccatctcaggaactaaatcacttctacccagtcccatcctctcttccagcgccctctcaacgcttggttatcagcagcaccataggtctcacccagagaaatgtttacatacaccagtgctagcaggagacatcacactctgcctcaatgcatggaatatgctccttatttttatttttagagccggcgtcttgctctgctgccccaggctggagtgcagtggtgtgatcatagctcactgcagccttgaattcatgggctcaagtaattcccctggcctcggcttcccgagtagctggaattagaggtgtgcaccccccacatctggctaattttttttttcctttgtagactggagtcttgctgtttcgtagactggagtcttgctggtctcaaactcccagcctcaagtgattctcccacctcggccttccaaagtgct[132 bp omitted]ctcactgcaaactccacctcccaggttcaagcgattctcctgcctcagcctcccgagtagctgggattacaggcgctcgccactgcacccggctaatttttgtatttgtagtagagatggggttt[133 bp omitted]agcttgggcaagggtcaaccagaaacagggcaatgaagaccagggagttaatcctgctctttgtgactcttcaccaggctccactttaactgagagggtggaatgaagacacagcgggatggagggaatttaaggaaagtaaggatggtggtgagagggtgtgcactgactctaaaaatgatgggattacctgtttcagctcctcataactcagtaacaggaagtttttctcctctctcatgggcatccagccatgaatgtggtcaaaccatgacccatatagcactgcatggggtggcagaaaaagtgataggttacaaattttatgagagcaggcatccagtctattatgttcatccccccaccggcttgttaacgtatgattgacaaataaaacttgaatgaaacttggtcgaaggggaccaacaaatggtatatatttacagtatataacagatgttttgatgtacgcatacactatggaatgacagtgtattagtcagttttcacactgctgtgaagaactgcccaagactgggtaattcacaaaggaaagtggcctaattgactcacagttcagtgtggctgggggagcctcaggaaactcacaatcatggaggaaggggaagcaaggcaacttcctcacaaggcggcaggagggaggagtgagtgccagcaggggaaatgccagccacttataataccatcagatctcaaatgtggcatgtatacaccatggaatacaatgcagccatgaaaaaggatgagttcatatcctttgtagggacatggatgaagcgggaaaccatcattctgagcaaactatcgcaaggacagaaaaccaaacaccacatattctcactcataggtgggaattgaacaatgagaacacttggacacagggtggggaacatcacacaccggggcctgtcatggggcggggggagggggagggatagcattaggagatatacctaatgtaaatgacgagttaatgggtgcagcacaccaacatagcacatgtatacatatgtaacaaacctgtacgttgtgcacatgtaccctagaacttaaagtata[174 bp omitted]gatggcgggcgcctgtagtcccagctactcgggaggctgaggcgggagaatggtgtgaacctgggaggcggagct[134 bp omitted]tcactgtcatgagaacagcatgggggaaaccactactatgatccaatcacttcccaccaggtccctcctacaacacgtggggattatggggattacaattcgagatgagatttgggtggggacacaaagcctaaccatatcagacagaatcaagctaattaacatattcatttcctcatatacttaccattttttgtcggggcggtgagaacatttaagatggtctctcttagcaattgtcaagtatggaatacattattattattattattattattattattattattattattgacacagagtctcactctgtcacccaggctgtagtgccatggagtgatctcggctcgctgcaacctctgcctcctagattcaagcgattctcctgccttagccttccaagtagctgagactacgggcacatgccaccacactcggctaattttttgtatttttaatagagatagggctttgccatgttggccaggctggtcttgaactcctgacctcaggtgatccgcctgcctcggcctcccaaagtgctgagaccagaatgaagatattaatcaagatggtaggacttaattaataattagagataggaaagtggtgaggggcctaggggagtgggatgggaaaagagaatgcttatgaaatattagactcatgctagtctttgcatgaggggtggagtaagataaaccccacgcagttaagaaaggtgttcaaatgtttttatttgagatggagttttgattttgttgcccaggctggggtgcagtggcgtgatcttggctcactgccacctctacctcctgggttcaagcaattctcgtgcctcagcctcctgagtagctgggattacaggcacccaccaccacggccagctaatttttctgtatttttagtagagacagtttcattatgttggccaggctggtctcgaactcctgaccccaggtgatccacctgcctt[131 bp omitted]gcctcggcctcccatagtgttgggattacatgtgtgagccaccgcgcccagccagaaaggtgttcaaatttgagtgtactgaattagaggcattggtggctctctctaatggaggtatctgtagctggtgtattgcagagagacacatcacagctgagatagaggctcatagagttttgagatcaattgcaaaatggaaagtactgaaaaagcccaggaattctgcataactaaatatatagcgatcctagagtcatgcaatcagttctgagacagatagaaacagaatattaagagggttttggaaagaggcatcagaaaaaaatggcggaaggtcaggattgtgttgtcccggaagccagtgaaaagctaacttccagacatctagcattaggagactagaggagaatataagtttcctgtgctagtattggaggctctagagacttagaaaatagctaggatggtttatcatggggcaagctgaggggccggctagagttctgctgctatgcgggagagtaagcgaacttagcaggtttggcctccaggggtggtggagcctttcaacccatgggttggtgagatgtagagatgtgaggctgggtgtcaaaagaggtcggctagaagactccaagcacccccatattttgtgaaacactcaccagttccttgacaaaaccattcaaaatattcttcccatgactttggtttcttaataaacttcatgtttttccagaaaaaataaccagacaccaaaacatctctgggatttctcatgagataaatcaccttaaatggaaaaacgggagaatgaaaaatcaatacagtcaatcctcactctttttgatcttcacaaaaatggagaaaaagccaattcctggataatgcctaataatatcaatggattcttttaacaaattacttactgcactcactaatcaaatttgatgtgcctatgaagtagtcactgcactaggaatatatcaatggaagaaggaagcatcgttccttccctctgggatattacagtctgctcacaatgggaagaacatggaaggtttccaaaggtgagtgatgtatatttgtgtactatggtttaaagatcattaacaggagaatgaattcataaattaagctacattcatagatatatagcaatattatccatatacaacacccaagatcatggacacatttcagagacattactttgtcctttgggccaggcatggtggctcatgcctgtaatcctagcactttgggaggctgaatcactcgaggtcaggagttcgagaccagcctggccaacatagtgaaaccctgtgtctactaaaaatacaaaaattagccaggcatggtggcgcacacctctagtcctagctactcaggaggctggagcaggagaatcacttgaacctggggaggtggaggttgcagtgagccaagatcgcaccaatgcactccagcctgggtgacagaatgagactgtgtctcaaaataataataataataataattcacacacctataaacaccttccaggaaagtacaattctagaagcagtctgagccatgcaaggtcctggatatgccttgtccctcttgtgatcacccctctgccccatgggagatgcatgtggctgctgatatcaacacatatttacacacagtaagacgaagtgtgtacagagcccagtcctggccccggggcagtcaacctggatacaggcattgattgatgaacatgctgcttcccataggaacacctctgtgtcttttctgtggcaggaggcatttgttgaattcagattggctaattattttttagggcaaccaaaggcggttatctagtatataatatggctatacattctgattgcacttagaacctagttttctaagattctgggttagtgttttcaccctatccctggtttaaatctggctggggtaatctgtggaatggtctatatccttgaactcaaggacagttctgggagcagccacataggtgtcacctaatacggaatctcaggtctcaacaacacagacctgttgaaggagaatgcatttcagcaagatctccagatgacttataggcatatcagtgtttgaaaggcactgatcaaacacgtcttaaccattatgcactgaccttggccttggaactgaagaaagacttggggaataactggatggggaggtgggaggagaataaacgtggactctccgtttcactgagtgctgtatacccaatctcactctctacccagggtgatcgctcccagatgggcacagattggatccacttggcatcccccttggagtgcatcaggcagagaatctcagccaaccagtttgttcc[220 bp omitted]gaggcagagaattgcttgaacctgggaggcggaggttgcggtgagccgagatcgtgccatggcactccagcctgggcaacagagtgagactcagtctcaaaaaaaaaaacaaaaacaaaaacaaaaaaaagtaccatctcaaccttaatttttttattatttatttatttatttatttattttgagacagagtcttgctctgtcacccaggctggagtgcaatggcacgatctcagttcactgcaagctgtgcatcccgggttcatgccattctcctgcctcagcctcccaagtagctgggactacaggcgcccaccaccacgtct[131 bp omitted]cactgcgcctggctttttttttttttttttttagcgatgaggtctccctctgtagcccaggctagagtgcagtggtgcaattatagcccactgcagccttgaactcgggctcaagtgatccttgtacttcggcctcctgcttcagcctcgcaagtatctgagacctcaggcatgtgccatcgcgctgggctaattttttgaaaaaattttattgtagagatcaggccttgctatgttgcccaggctggtcttgaacgcttgacctcaagcaatctgcctatcttgccctccc[137 bp omitted]acctccatctcctgggttcaagtgattctcttggtcagcctcccgagtagctggaactacagacgtgcgccacagcgcctggctaattttttatttttagtagagacggggttttgccatgttggccaggctggtgtcgaactcctgacctcaggcaatccacctgccttgacctcccaaagtgctgggattacaggtatgagccaccatgcccagcctgtcaaccacttttaagcctacggtttcgtagtgttaagtgttaagtatattcccagtgctgctcaaccaatctccagaggatttttgtgttgcaaaaccgaaactctatgcagagccagcaccgactccccatttacccttctcttcagcccctggcagccgccagtgtactttctgtttctatggacttgatgactccaggtaccttatgtaagtggaatcacacactatttgtatttttgtgactggcttatttcatttagcataatgtccttgatgtttatctctgttgtatcatgcatcagaattttcttccttctcaaggatgaataacattccattatagctatataccacattttgtttattcactcacctgtcagtggatatctgggttgcttccatcttttggctatttgctgaaatccctcttattatgttcccattgctcttggcctctcagggccatgccacttccaatgtcttcagcctcaatcctcaccgcatccgcagtgctcttaccgccctccacccacagccccactcccagagacatatgatcctcatctttcagccccttgagattgcctggctcttttgtggttcctggccattgccctgatgattctcctatctgaaaatagccctccccccaagtaatttcatactcattctttgcatttccatttaaatgctatttcttctttcaggacatcattggtcatcctcagccatcctccctcccactgccaccaaacaaacacctgaatttgccttgggattcactcctgtggattctcctaataccttagattacccctctgaacactcatcctactgtgtaatttcctgactaaatccttttctctgattgtcaatggtattaggcattcctctcttccccttaaagcattgtacactgtctgacataaaggaagaactccaatcatgcactgaatggacaggaacacaaccacagcctttctcagttcacgattctgcctccttacctgatttggggtaagtcaatattattacatcttcatcccttatcacgaactcatcacgtacttttcttaaggtttcggatctgaaacccatagtagggaaagctatgccttcaaaccataagaaatcgtccgacatgatgatgacctcttcctgcgtggtgtgagggtttcaactgtagccaccgctggaggctgtggcagctacaggcagatcagcttttacagcaaggataaaacgatctttaaccttgtcccagcatgtcacatgtttgttgtaaagtttacttgctgataaagagaggtataatgtgacccatactcaaaagattgaagatgttgagcaatcatgaacttatctagagaccattttaggggtcatctgagcttgcgttcctgagagtgaactgcaagatcgaataacaaacacgaggacaaatattttttttgataatatgggtgaatttatttcttaaggtttgagtgcaaacttaaaaacaagaacaaagcttttcatcaagcataaacacaaaatctaaataatcctgcaatcgtgcattttaacagaaagtacaaatatgaatacattataatttgtaactgcatttaaaaattaaaatatgtctctccaaatccaaaagaccacacagtctttatctgttctcatcttgttaccttagaaacatttgtcatatgctctcaggaaaatataggcaagaattactaatcagttattcacgatcaaagaaacattattctccctgagactttttgaatcatttatctgtatttctgaagtatcacacaattatacctccactctagagaaaaaaagagtaagtacaaatattagcagtgtatatattgtagtaaatttttaaagtacaactttagttgatggctgacgtgtatgtaataattgtgaacaatttaaacggtataaaaatgtgagatgaaaatctttagactcaaatacttgaaaagtcactatgaatatggaaagatttgtttgcataaacatgtatgtttttagatggaaaatcaagaggtagtggcatctccctgtttccttaataatatttggattttcacaaagaattggcagcacccaaccttaagtgttaattatgtgtttgtttgttttttttttttttttgagatggagtctcactctgtcgtccaggctggagtgtagtggcgcgatctcggcttgctgcaagctctgcctactgggttcatgccattctcctgcctc[134 bp omitted]agcctaattatgtgtttctaaaggacctatacaacagatcagttggcagtgttctagctttagggagatgggggtggattgggggtgcaaatatctgagataagataatgcatgcactcacacatttaaaatcaccattctaaatgggaaaaaaaaatcacatattgggaaagtccaagaaactcattcttaagggataaacagcagggcaggagcaaaagctgaatagaagtctacttgataataatgttttttcactcttcaaaggcaagttgggaagaatgagaatactcacatacacataacttcagggaaaacgtgcctagaattttaccttgcaaaaca[222 bp omitted]gaggc[138 bp omitted]tgtttataatacttgatttttcccttattaccaccctgtacatcacatttaagtattttctttataaatattttagagcaaaaagaatttattttgttgcaatggtggcccacatctgtacaaaacaacctaaacaagatatatatgtatatatatatgcatatatatatgcgcatatatatatgcatatatataaaatgattaagaaaaagtgcaaagaataacagtattaagaatttttgcattttatagtaactgtggttcaagcgtgaatatctatcagcgatatataatcccaggttttactttttaattttatttatttatttattgttttgagatggactcttgctcttgtcacccaggttagagtgcaatggcatgatctcgggctcactgcaacctccgcctgctgggtccaagcgattctcttgcctcagcctcctgagtagctgggattacaggcgcccaccaccacgcctggctaatttttg[134 bp omitted]atttaattaaagattcaaaaacaaaccacactccaaattactgcacaaacatcggtcccttatcaagcaagtctgcccttctcctgaatctagtatttccagtttctaaactcttcccaaacaggaaaaaaatatttttaatacgcctcattttttagggcacttttagacttacagaaaaattgcaaagagagtacagagagttcccatagtccatacttaatttggatttccttagtttttatctcatgctcgtgttttttttttttttttttgacagagttctctctttgttgcccaggctgaagtgcagtggcatgatcctggctcactgtctcatgccctttttttgccccaaaatcccatcctgtatagtacatgacatacactcatcctgtctccttgggctcctcttggctgtgacagttgttgctcagactttcctcattttttttttttttgagatggagtcttgctctgctgcccaggctggagtgcagtggcacaatcttggctcactgcagcctctgcctccccagttcaagtgattctcctgcctcagcctcacgagtagctgggattacaggcacgcgccactacacccggctaatttttgcatttttagtagaaacggggtttcaccatattggccaggctggtctcgaactcctgacctcaggtgatccgcccactttggcctcccaaagtactgggattacaggtgcgaaccactgcgcctggccgactttcctcatttttgatgaccttgatggttttgaagaacactggtgaggcattttgtacaatgttcctcctttgggatttattgcaggttttctcatccaacaaatgagttcatgggttttggagaggaaggtcacagaggtaaaataccatgatcatcacaccatatcaaggggacttattagcaacatgacctggcactaatgatgttgaccttggtcaccagaggtcacttgacttttctccctcttccctttctatgtggccatattttaaacataaactctaggcctgaatatattagtgagataacattatatgaaccccaaatgagggacagtctgcaaaatgacgggcctgtactttttaaattgtgaaaaaattttttttttttgaaacggagtctcgtgctcagttgcccaggctggagtgcagtggcacgatctcagctcgctgcaagctctatacctcctgggttcacgccattctcctgcctcagcctcccgagtacctgagactacaggtgccagccacca[138 bp omitted]cctggcctattatttattttattttattttgagatggagtctcactctgttgcccaggctggagtgcagtggtgcaatctcagctcactgcaacttccgcctctccagttcaagtgaacctcttgcctcagcctcctgagcagctgggattacaaaggtgtgccaccatgcccagctaagttttgtacttttagtagagatggggtttcaccatgttggccaggcaggtcttgaactcctgatctcaggtgatccacctgccttgacctcccaaagaattacaggcatgagccgccacgcctggccatacttatatcttttttaaaaagacaaaggatattattatttgacagaaaagggaaataaaaggaccattaaaccatacaattgattattaatcatacctgtaatcagggaaatacaaatcaaaatcacagtaatgcatgtaggttgtcacttcttatacgttagaagaaaaaaatgggatgatactacctgttggtcaggccgttcgaatttgggggatctgttcatttgcatggtggtattggaggagagtttcagaaagtaactggagttgaaacttgcagagatatatgtccttggagacattttcatacatggacaaggaaactcgaaaaaaaaatgtgtatttcaacattgcaaccgtgaaaaatgggaaaccagttgaatttggggatgaatgattaatttaaaacacaggataagttatagaatatgtggaagatgacactatagttgaatgaatgaatgaatgaatgaatgaatgggacttacatctgtcagcctgcacacactcagcacagaatgttagaggaacaggcagattcctaattatgaagagatggtgctcaggccacgttcacaggcacagagcagtggggagaggtgccatgatcgtaaacaccacgggcaggaagttgcagaacaatttcacctctggaaaggggagcagagcagcagactcaggaaagactttagaagaagcctcaattgtgttttgactttctcactggagtctttatctgaagccatagggcaaaatgatagccttaaagagttttgttgacatgcttttcttttcttttttttttttgagacagagtcttactctgtttttcaggctggagtgcaatggcgtgatctcggctcactgcaacctccaccttctgggttcaagtgattctcctgcctcagcctcctgagtagctgggattacaggtaggcaccaccatacctggctaatttttgtatctttagtagagatggggttttgccatattggccaagctggtctcaaacccctgacctcaagtgatctgcttgcctcagcctcccaaagtgctgggattacaggcctgagccaccgtgcccagcctgtttacctgcttttctatatgtgtgagacatttcattataaaatgaatagataaaacctaaacatggctccacgtgggcactggcagattggctgggatgagctcctgagatcttatctccagcatctggtttgggttctttccatgtctggcagtaatctctggagctggaagaatcacttcagctgtggcccagagtgaggcctctgaggagctgatctgggagaagatgtcaatgtccccccagggctgagatcagggctgtggatagtgagagaggaggtaggaagaaagtggtcagacaggcagttagggtgagtccttggtaaaactccttcaaacgaagaacagcctgaaaatccagctgcaggccccagataagaaagagctcacatcagcaaaatttcttcaaatcaagaacagcctgaatatcaagctacaggccctagataagaaacagcccgcgtccttgaatggaaatgcctgctctgtgaacctagataaacaaattccactccttttttggacacattttcctccctttgatgcatgtttgtctcatttcacatgcttcctctggattgatccttacctttcacctattttacatatacttatctttctgtgattggccgtgggcaaaatcctcatttgcataaagtgtaacatcactccagcccctaattggttgcaggccaagccttcacctcagcctctaattggctcttttcactgttgtgtgtctttctgagtggcccacagaccagtcaagcacactcctcccacttcccagtccataaaaccactgaacttagccctgcagccagcaactctttgtcgggtcacctctctttgttgagagcttttctgtcactttcgcttgataaatcccactctgtcctactcagtctccagtgtcaacgtttcttattcttcttggttgtgggacaagaacctggagcttgctggtggtgggagtaaaagaactacaacactccct[137 bp omitted]tctctactaaaaatacaaaaaattagctaggcgtggtggcgggtgcctgtaatctcagctacttgggaggctgaggcaggagaaacacttgaacccgggaggcagaggttgcggtgaactgagatcatgccactgcactccagcctgggcgacagagtgataccctgtctcaaaaaaaaaaaaaaaaattgcccctagttgagaaccactgtcttagatgtaaaagctgttattcagacaaagaggacgggtgaatgctggtgtcatcagcagagagaagggtagagttcatctcctggaggcacatttagaatagatgccatctttcacatgggcacatacttccatttcacattcattctttctaaaagaactagattataggccaggcgcggtg[131 bp omitted]gtggcgggtgcctgtagtcccagctactcagggggctgaggcgggagaatggcatgaacccgggaggcggggcttgcagttagctgagatcacgccactgcattccagcctgggtgacagagcaagactacgtctcaaaacaaacaaacaaaaaactagattataaaattctaaaagcaatcatataagcaatcatgtattttaaagacaattataataatactgccaacaacaagattatgttatttagttttcacagtgaccatgggaagggtaagaaattattttactttattttacagatgatgaaactgagacacacagatcttaaaggatacttttgaacttttaaagtcagtatttcttttgttttctttttttgtttttttgagacagagtttcactctgtctccgaggctggggtacagcgatgcgatctcggctcactgcaacctccacttcctggttcaaaccattcttgtgcttcagcctcccaagcaactgggattacagccccccaccatcatgcctggctaatttttgtatttttggtagacatggggtttcaaccatgttggccaggctggtctcgaactccttacctcaggtgatctgcctgccttggccatccaaagtgctgggactacaagggtgagccaccacacccggtctaaagtcagtattttttcttttcttttcttttttttttttttttttttg[235 bp omitted]gcctcccaaagtgctggtattacaggcgtgagccaccgcgcccggccataaagtcagtattttttcatccataaacatttagatgaagattatttcgtgccagacattctaagtacttta[132 bp omitted]tcctggattttacgccattctcctgcctcagcctccc[213 bp omitted]gatgcaggatctgaaccacagagaggttaggttgtgggctcaagaacacacagcaaacaagttcccacctcaaactgaaacccagaacatgtgctcttaatcacaacactgttaggctcccttttctcccgcaggaaaaaaatgattaattaactcatcct[133 bp omitted]tctgctcaaaatacaaaaattagccgggcatggtggtgctgcacacctgtagtctcagctattcgggaggctgaggcaggagaatcgcttgaacctgggaggcggaggttgcagtgagccgagatcgtgccattgcactccagcctgggcacagagtgagactctgtctcaaaaaaaagaaagtgacctagttgtgattcaaactcaggtttagtcctttgaatttgtgctgagtcatcattctgctaatggaattggaaaacttagaacatttgttccaggaaggaatgttaggaaagaaacaagtggtcctggcaacattttatagtacttagtttagaaatcaatttttcagtatccttcagttgcaaaatacagattgtgaaattattaatgttctgttttctttactagtacctaacaaaccacccccaaacttagtggcttaaagtagagatttggcaaacttttttttgtttgtttgtttttggtggagggagggagtgaggtggctccctgacccaaggtcttccatggtccaacctccctcaccgccatcccacctgcaaagggagggcacagaactgttttctgttctatgactccatagggcagacttttttttttttttttttttgagaagggctagagaatgaatattttcagctttgaaggccatgtttctactactctgccattacagcatgaaaacattatggacaatacatccatgaatgagtgtggccgtgtgccaacaaaactttgcttaccaaacaaggtagtgggcccgatttggtttgtatatggtagtttgctgactcctggcttaaaacacaattctgtggttctagggctttactgggctcagctgagtggttctaatttggagtctgtcatgatactgcagccagataatatctagggctgggattgtttgaagacttcttcactcacatggcttgcacctgggctctgaaggttggaacagcttcgggctggttggacatctgtatcttaaagatgcctctcatactcctattccaatttcttttattccccccattccgatttctaaaaataaaagaaaaaaattaaaagatgcctctctgtgtgactagcttgggcttccttacagcatggccgtctcccagtgaggatgctccaagagacttaaggtgatactttcaatgtttcttaggatctgactttaggagtcacaggcatcacttctgctttattctattggttaaaacctagtcataggtccagtcctgattcaaggggaaggaatgacacagggaataaatactggtagatcgctctttgggtaccatctttgggaacaagccaccagtttgatttttcagagaacttgctgacttccagatgctaatattcttgtggcccagtaaagatcacacaaacccaaataacatggccaggatggaaatacatacctttatgtgataactgttcatagcagaaggttttataccctccctttggtagacagtttactggagaaatctgaaaagaatgctattgataaaaattcactttgactgtaagaattgtggttatttgataggtttttggatgctcacgttgaaacagagtggagagttgatatgtaggttgagaaataaacatttagtctggacaatgtgtgtgcattatgggaagatgtgttaagccctggccaggcctgctagcttcagagagctagctcatgggtcaacttcagactctggaagaaggactttcaccccactttccatctgcacgctatgtcaagtcaggggtccctgatatctgtggtccaagctctacaaatgcgtgtgttcactgtacagcaggggaagtgtgcctttgagtttctgctaaataggcttaattccacctgccacaagctgacaaagacctgagatcagggcttcatgctatctagttatctccctgtgtacctttgccctttccatttacctataaacggcatgcctgggcaacgcaccaggatctacttccatcaggttggtggaaaagtaattgcggtttttgccattacatttatgacattgcaattacttttttttttttttttttttgagacggagtctcactctgttgaccgggctggagtgcagtggcatgatctcggctcactacaacctctgcctcccaggttcaagcaattctctgcctcagcctcccgagtagctgggattacaggcacctgccaccatgcccagctgatgtttgtatatttagtagagatggggttttcaccatgttgcccaggctggtcttgaactcctgacctcgtgattcacccgtctcggcttcccaaggtgttgggattacaggcgtgagccaccatgcccggcctttttatttttattgattttttttttttaggtggggtctcactttgtcatccaggctggagtgcagtggcacgatcttagctcactgcaacctccgcttcccaggttcaagcgattcttctgcctcagcctcctgagtagctgggattacaggcatgtgccaccatgcctggctaatttttgtatttttagtagagatgggatttcaccatgcaaccccagctcactgtaacctctgcctcccaggttcaagcaattctctgcctcagcctcccgagtacctgggattacaggcacccgctgccatgcccagctaatttttatatttttagtagagacagggtttcaccattttggccaggctggtctggaactcctgacctcaggtgatccacccatctcagcctcccaaagtggtgggattacagacgtgaggcactgcacccagccaagaaaccgcagttacttttgcaccaacctaataggagccattcctggacattggtcccgtttttattttatgatccaggggctccatctggatttgcaggaagagagaacagaagtttcacactgattccaggccaaagccttgagcgctagcacccgttggcagaggactcctgcatttgcaggatatttaggaacgccctggcaacaacagaagtggaacattcctcatttttcactgcccttctgacgctgtgcacgtaatttttttgtagaaggaaatagatcaaattgtaggagttaggaagcaaatgcctgaggttgaatgcgctctgtatttggtatctgctggatgataggaaatgggtttttttgttttgttttgtttttgtttttgttttttttttgagacagagttttgctcttgctgcccaggctggagtgcaatgacgcgatctcgactcactgcgacctccgcttcccgggttcaagcgattctcctgcctcagcctcctgcgtagctgggattacaggcatgcgcgaccatgcgtggctaatttggtatttttagtagagacggggtttctgcatgtcggtcgggctggtctcaaactcccgacctcaggtgatccacctgactcaggcctcccaaagtgctgggattacaggcatgagccacctcgcccagccaggaaatggttttattgtggacttctattttagtcccccacccccaggaagtataatccctctaactgcctggatggctcccatcctgtttataagactccagggagggaatcatcagtctcgtttcaatctatagattggtgcaaaagtaactgtggttttggccattactttcaatggcaaatctgcaattacttttgcaccaaccttaatagggttcctaattgttaggatgtattgcaagacactatagtggcatagcccagatggggcaaacagaatatgtatggtttgtttcctgactctgagcagtcagcagtcgatgcacagaactctgcacgcccctccccccacagtgtctattccggttcaagcatgcctactgaaacactaatttaagtcctttaatttctaccggttgaccctgatgatgtctgtgatgtttagacttttgtgtcagcttggctagcctgcagtacgcagttttttgtttttttttaacagaatcttgccctgtcgtccaggctggagtgcagtggcacaatctcagctcactgcaacctctgccacccgggttcaagcaattctcctgcctc[134 bp omitted]cagcctcccaggcatgagccactgtgcccggcccagtacccacttgtttaatcaaatgctagcctaggtgttgctgtgacagtatttcgtagacacagttaacatctacaatcagttgattttaaataaaggagatgaatggcgataacctgggtgggcccaagctaatcagttgaaggccttaagaacataaagaggtttcctgtagaagaaattctgcctgaagactgcagcatcaaatcctctctaagcttccaaacttccagcgtgccctacagattttggacttgccagcctctacaactgcatgagtcaatttcgtcaatttctttactcctccctgccgtgttttttttttttttgaaacagagtctcgctctgtcgcccaggctagagtgcagtggcacgatctcagctcactgcaacctccgccttctgggttcaagcgattcttgtgcctcagcctcccaagtagctgggattacaggcgtgcgccaccatgcccagctaatttttgtgtttttagtagagacggggtttccccatactggccaggctggtcttgaactcttgacctcatgcaatccacccacctctgcctcctaaagtgttgggattacaggcatgagccgccgtacccagcccaatttcttgaaatcaatcactttcctgttgattctgtttccctggagagtgctaactgtccccttatcctatgccacagatttactcttctgatcctttcatttatttgatactcggtgaattatacgaacactaactatgggctgggccccatcttgtccaataatttcccctctgcatataagcccagactcaatttaagatccctaaaacatgcaccagtgcccagatgtccttaatggagctaaggtttcaggctattgaagatgttaggaagggaggacagaaaccaaacacagtaagttctcaacacagaattcagaatttctctcttattctatatgattgttcttctgactacatatataccttttgtgacaaaatacgaacacctttggagattaagtgcttaaccagtgggattgcttcatatatcattatctgtagcctcactccctcaattatttctttcttttttttttttttttttttttgagacagggtgttgctctgtcacccaggctggagtgcagtggcaggatctcggctcactgcaacctctgcctcccgggttcaagcgattctcctgcctcaacctcccgagtagctgggactacgggcatacgccaccatgcccggctaatttttttttttttttgtaaaaagagagggggtttcaccatgttggccaggttggtcttgaactcctgacctcaaatgatctgcctgcctcggcctcccaaagtgctgaggttacaggcgtgagccaccgtgcccagccatctactcttaagtttggttgaagtttgtttatatattgttaggttacagtttgccacataaggaggcagctttaggccaaatttcacttaatttaaacaactggttttctcaatgctgcagtgaggtgagggcagaaaggcttgagcgcttgatgtgtcgggagggaaatatcttcactaacatagaacaacctgaaatttcaatggatcacatctgagaaatgaatctgaggttgagttgaaatcaaatatataaagtcaggtaggagtgaggacaaaatgccaatacttgatgtttcataaatgctttcatacataccagggaactattattatctctattttagagttaaaaaagggggtgttcagagtggttaatcattttacgaagtcatgtagctcctaagtggcagagctgggatttgatcccaggcactttcattccaagtctgtgtttgtaatctgtgacttatggtccccaaaagatacgttcacgtcccaacctctggaacctaccaatgtgaccttatttggaaaaagggtctttgcagatggcatcaagtgaagaatctcaagatgagagtatcattaattacctggtgggccttaaatccaataacaagtatccttatgagataaaaaagaggagaagacacaggcacacagagtagaaggccacatgaagttggaggcagagactggagtgttgcagccataagccaccgaaggtctgcagccaccaggcgctggaagagaccaggaaggatccttccccagagcctccagagggaatgtggcctgaccgataccttgattttggacttctggcctccagcactgtgagagaataacccacgatagtgtggtggtttgctctggcaggcacaggaagctaatacagtgctctttagttctacatggccccgcttcctccagagctacgtgggccttccctattagttgatgttcatcagttctattgcacaaagctgaagatgtccaacaacggtactcaaatcccacacatccttggggaccttgagggttctaggctctctaaggtaaggtgcctgttagggaggacagaatccagaaacagtgagttcgtttttttttcttttctttttctgttttttttgagagggagtttcactcttattgcctggctggagtgcaatggcaagatctcggctcactgcaacctccgccttccgggttcaagcaattctcctgcctcagcctcccgagtagctggaattacaggcatgtgtcaccactccaggctaattttgtatttttagtagagatggggtttc[137 bp omitted]tctcccattctgtactcttctcta[154 bp omitted]gaaaatacagaaattagctgggcgtggtggcaggctcctgtaatcccagctactccagaggctgaggcaggagaattgcttgaactcggagggcggaggttgaagtgagccgagattgtgccactgcaatccagcctgggtgacagagtgagactctgttacacacacaaaaaaaaacaaaaaacaaaacaacaaacaaacgtttgcatctgaaagaaatctgcatacttttgtatcattttcgttgatatttctctcaggttcatcaatcttgccagaagatctgcagaatctgcagatattcttactagagaagccgcagtgagtgtgaacatttcagccggggatgggaggaaggaaaagcagtcctggggacattttttgctccaggggaccagtgatgctccattaagtggcacttgcagatcaagttctgtttctgctttgaacagaatgttcaggcacccgagagatagaacaaagtgctgaactccgttcttcacgtcattaaccttaatgaccttcagacagttcccatccatacacagagtcctacagatttttgagatccaaaaggttattttactattgtcttaccaaatttctaggggacttgtctttagaattaggtagcggctatgtgaatcttccaggggtaaaggtcctctgcttcctcacagggattctcccacaatcccttcctgcatgccacaaacacagcatgtccctttcccctcaatccctgcaccttccaggcaacatttaatgcacctttttttttttttgagacagagtctcacccaggctggagtgcagtggtgcgatctcggctcactgcaacctccgcctcctgggtacaagtgattcttctgcctcagcctcttgagtagctgggactataggcacatgccaccacgcctggctaatttttctatttttagtagagacggggtttcaccacattggccaggctggtctacaactcctaaccccatgatctgcccaccttgccctcccaaagtgctgggattacaggcatgagacaccgcgcctggcctttttttttttttttttctttttttttaggacagagtctcacccaggttggagtgcagtgacacgatctctgttcactgcaacctccgcctcccgggttcaagcgattcccctgcctcagcctcctgaacagctgggattacaggcacccgtccccatgcccgggtaatttttgtatatttagtagagatggggtttcaccatg[135 bp omitted]gggctaagcctcaattttggggctcgcctgtgctgcatcagcttcacacctagagaagagagtgaaagagaagggagagccgtccttttgggctgccttgaaataaaggttgacccatgggttcatgtattgtcattcattctcattttctcttcctctctttctctctctcccctgccccttaagttagcttttctaaaccctacctggataaggataagaaatagaaggaggggacactttaggatgctacaaaataaaatacaacaacaacaacaataacagcagcagcaacaacaaaacagcaacaaaaggggaagaaacaaatctggccactgcacattcctccttggcaacaaaaagccgtggatgcaaaaagctgcccttcactgcatagacagaacagggcgcgctcgagctatgaatctcggaaattactcaaaccatcagcctctgcaagaagcaaagtggacggccgggcgcggtggctcactcctggaatcccagcactttgggagcccgaggtgggcggatcacgaggtcaggagatcgagactgttctggctaaaccagtgaaaccccctctctactaaaaaaataagaaaagcgaagtgcatctcccataaacgaggtactgcaggaagaaagcagaaaatgagacccgagtacacacatgcacgcgggcgcgcgcacacacacaccagaagaaatgaaccaagaggaaaggaaacattttcaaataagcatttggagatgggaaaaacacgttgaaacagaaattcataaagcacagaatttttttttaagttaaaaaaggaacaataatagacagaaaatgaatgaaaaattaaatgtcatatcagaagtgaagataaattaaaagtggtcaagggagaagagatctaaatgcaaacttaagaaggggcaattttttttttttttttttttttgagacgcagcctcactctgtcgcccgggctggagtgcagtggcgtgatcttggctcactgaaacctctgcctcctggattcaagcgattctcctgcctcagcctcccaagtggctgggattacaggcatgagccaccatgcccggcctagagtcatcatggaaattaaacaacctgcttccaaatgacttttgggtaaagactgaaattaaggcagaaataaaaaaattatctgaaactaatgaaaacaaacatacaacatcccagaatctctgggacacagctagaacagtgctcaaaggaagtttctagtgctaaagggctacactaagaagctagaaagatctcaaatgaaccgcctaacatcacacctagaggaattagaaaaacaagagcaaatcaaccccaaagctagcagaagaaaaaaaaaaaccaacatcggagctgacctgaatgaaatggagacgtaaaaaaccatacaaaagatcaatgaaacccaaagttgattttttaaaaaaattatttatttattatttattccataaattattggggtacaggtggtgtgtggttacataagctctttagtggtgatttgtgattttggtgcacccatcacctgagcagtatacactacaccctacttgttgtattttatccctcgcccccgccaactcgtccccctaagtccccaaagtccattgtatcattcttacgcctttgcgtcctcatagcttagctcccacatatcagtgagaacatacgatgtttggttttccattcctgagttacttcacttagaataacagtctccggtctcatccaggtcacggcaaatgctgttaattcatacaaagttgatatttttgaaagcataaataacatgggaagaccactagctagattaataaagaaaaaaagacaagatccaaataaacacaatcagaaatgacaaaggtgacattaccactgacccacagatatacaagaaaccctgagactattccacatgcctctatgcacacaaactagaaaactagaagaaatagagaaattcctggaaacataaaacctctcaagattgaaccaggaagaaatggaaaccctgaacaaaccaacgatgagttccaaaattgagttagtcatacaaaacctaccaaccagcacaaaaaaccttagactagacggattcacagtcgaatcctaccagatgtgtaaagaaaagccggcaccaatcctactgaaattattccacacaattgaggaggagcaactgctctctaactcattctatgaggtcagagtcattctgatactgaaacctggcagagacacaacgaaaaaaggaaaataggtaaagtaatacatatgttaatgatcttgatttagccattctacggtatatacatatttcaaaacaatatgtacatgataaatatgtacaatttgtcaattaaaaatatataaaaggaataggaaaaaattcaaatggcacagaatttgaaaggagaagatacagaacaaactccggtgtcttctttattcaactatatatacacacattcaatggactgggagcagtggctcaagcctgtaatcacagcactttgggaggtcaaggcgggcagatcacctgaggtcgggagttcgagaccagcctgaccaacagggagaaaccccagctctactaaaaatacaaaattagccgggcatggtggcgcatgcctgtaatcccagctactcggaaggctgaggcaggagaatcgcttgaactcaagaggtggaggttgtggtgagccgagatggcaccattgcactccagcctgggcaacaagagcgaaactcagtctcaaaaaaagaaaaaaaaggatttaatgaatgaatgatgagactgttggttacatctcccaccttctccctctcactccactgcagccacacggggctcctcactgttcccgtagcagcaggcatgtgcccccactgggcctctgtactggctgttcccactgcccgaacaccctcatgcaccatctgcactgtccaatatggccgcctctggccacacatggctactgagcagttgaacatggctggtccaaaccaacatttccaagacgtcgtatggtaaaaaataacataaaatcttgcaaaaatgtttctattgattatgttaaaattatgatgttttaggtatattaggttaaatcagctattttatccaaatgaatctcgcctgtttgtttttgcttttttttttttttttttttttgagatggaggctcgctctgtcgcccaggctagagtacaatggcgtggtctcggctcactgcatcactgcaacctctacctcccaggttcaagcgattctcctacctcaccctcccaagtggctgggattacaggcgtgtgccaccacacccagctaatttttgtatttttagtagagacagggtttcaccatgttggccaggctggtctcgaactgctgacctcgtgatctacctgcctcggcctcccaaagtcctgggattacaggtgtgggccactgcgccggccatgtttctcgacttctgctggcaagcatgttccagtatttgcatggctcctagccctcatctccatttctctgcacagatgttaccttccccatgaggtctgccttatacatgaggcctgtattataaactgcaactccgcattccccaaccccgttgtttcttctctccagaacactaggcaccatctgatctcctatgccttttccttattgtcagatactgaactctcagatacagttccccttcctccctccagggggcgccatggaacgcagggccctcactggccctggggactgggtgacgacaggggggagcctctggtgattggctccctcaccctgcgtaagatcaaagggactaaaggacagccccgacacccggagccattgtggctcaggcaggttgcgcctgccctcgggccctcacggaggcgggggttccagggcacgagttcgaggccagcctggtccacatgggtcggaaaaaaggacttttttttatcgttcccaatataacgacaaaacataaagggaggacgccttgataggaagaaatgacatcttcctaagtgtttttaaattacttccatgtgtcttttttttttttttttttgggagaccgagccttgctctgttgcccaggctggagtgcagtggtgtgatcttcgctcactgcaacctccgcctcgtcggttcaagggagtctcctatctaagcctcctgagtagctgggattacagtcgcctgccaagagatggggtttcgccatgttgaccaggctggtcttgaacacctggcctcaaatgatccactcgccttggtctcccaaagtggtaggatgacaggcgtgagccaccgcgcccagcctcttctattcttttagagacaggttctcactgtgttgcccaggctggagtgcattgatgtgatgtgtgatcatagctcattgcagccctgaccatccgagctcaagcaatccttctgcctcagcctcctgagtagctggggccgcagatgtgcaccactgcacctggctaatttttaacatttttgtggagccagagtctgtataaaataaagtgtaaatagtaccataaataaagaatacatagtaccattttatagtagtataaaacggacattagaaactctgaacttaaaggttaaaaaaatacacaaaagtagttctcaagttctagagacttggagaatccaggaatcaacaatgtcgtggaactcctacagcctttcataaagaatggccctcgaggaaagtggaattgtcagtgggcattgtgttcgtgcctcagctaaacacggcaggaatttatttataacctagtgtaacatcctcgaggcactgttcaattagtcaagcaattgtaaaattctcccagtcttagaaaagatacaggtgtgtgtccctctgctgtggctgtgcactgacgcttcagtaaaagttgccgtctaaaaccaccggcctgcccttgaattgttttgttttgttttgttttgttttgtttttttgattcgcagcctcactctatcacccaggctggagtgcagtgacacgatctctgttcactgcaacctccgcctcccgggttcaagcgattcccctgcctcagcctcctgaacagctgggattacaggcacccgtccccatgcccgggtaatttttgtatatttagtagagatggggtttcaccatt[135 bp omitted]gggctaagcctcaattttggggctcgcctgtgctgcatcagcttcacacctagagaagagagtgaaagagaagggagagccgtccttttgggctgccttgaaataaaggttgacccatgggttcatgtattgtcattcattctcattttctcttcctctctttctctctctcccctgccccttaagttagcttttctacaccctacctggataaggataagaaatagaaggaggggacactttaggatgctacaaaataaaatacaacaacaacaacaataacagcagcagcaacaacaacaacagcaacaaaaggggaagaaacaaatctggccactgcacattcctccttggcaacaaaaagccgtggatgcaaaaagctgcccttcactgcatagacagaagagggcgcgctcgagctatgaatctcggaaattactcaagccatcagcctctgcaagaagcaaagtggacggccgggcgcggcggctcactcctggaatcccagcactttgggagcccgaggtgggcggatcacgaggtcaggagatcgagactgttctggctaaaccagtgaaaccccctctctactaaaaaaataacaaaagcgaagtgcatctcccataaacgaggtactgcaggaagaaagcagaaaatgagacccgagtacacacatgcacgcgggcgtgcgcacacacacaccagaagaaatgaaccaagaggaaaggaaatattttcaagtaagcatttggagatgggaaaaacaccttgaaacagaaattcataaagtacacacatgtttttttttttaagttaaaagaggaacaataataaacaggcagaaaatgaataaaaaataaaatgtcatatcagaagtgaagataaattaaaagtggtcaaaggagaagagatctaaatgcaaacttaagaaggggcaattttttttttttttttttttgagacgcagcctcactctgtcgcccgggctggagtgcagtggcgtgatcttggctcactgaaacctctgcctcctggattcaagcgattctcctgcctcagcctcccaagtggctgggattacaggcatgagccaccatgcccggcctagagtcatcatggaaattaaacaacctgcttccaaatgacttttgggtaaagactgaaattaaggcagaaataaaaaaattatttgaaactaatgaaaacaaacatacaacatcccagaatctctgggacacagctacaacagtgctcagaggaagtttctagtgctatatggctacattaagaagctagaaagatctcaaatgaaccgcctaacatcacacctagaggaattagaaaaacaagagcaaatcaaccccaaagctagcagaagaaaaaaaaaaaacaaaatcagagctgagctgaatgaaattgagatgtaaaataccatacaaaagatcaatgaaacccaaagttgattttttaaaaaaattatttatttattatttattccataaattattggggtacaggtggtatgtggttacataagctctttagtggtgatttgtgattttggtgcacccatcacctgagcagtatacactaccccctatttgttgtcttttatccctcgccctcgccaactcgtccccctaagtccccaaagtccattgtatcattcttatgcctttgtgtcctcatagcttaggtcccacatatcagtgagaacatacgatgtttggttttccattcctgagttacttcacttagaataatactctccggtctcatccaggtcactgcaaatgctgttaattcatacaaagttgatatttttggaagcataaataacatggaaagaccactagctagattaataaagaaaaaaagacaagatccaaataaacacaatcagaaatgacagaggtgacattaccactgacccacagacatacaagaaaccctgagactattccaaatgcctctatgcacaaaaactagaaaactagaagaaatagagaaattcctggaaacataaaacctctcaagattgaaccaggaagaaatggaaaccctgaacaaaccaacgatgagttccaaaattgagttagtcatacaagacctaccaaccagcgcaaaaaaccttagactagacggattcacagtcgaattctaccagatgtgtaaagaaaagccggcaccaatcctactgaaattattccacacaattgaggaggagcaactgctctctaactcattctatgaggtcagagtcattctgataccgaaacctggcagagacacaacgaaaaaaggaaaataggtaaagtaatacatatgttaatgatcttgatttagccattctacggtatatacatatttcaaaacaatatgtacatgataaatatgtacaatttgtcaattaaaaatatataaaaggaagaggaaaaaattcaaatggcgtagaatttgaaaggagaagatacagaacaaactccagtgtcttattattcaactatatatacacacgttcaatggaccgggagcagtggctcaagcctgtaatcacagcactttgggaggtcaaggcgggcagatcacctgaggtcgggagttcgagaccagcctgaccaacagagagaaaccccagctctactaaaaatacaaaattagccgggcatggtgacgcatgcctgtaatcccagctactcgggagggtgaggcaggagaatcgcttgaactcaagaggtggaggttgtggtgagccgagatggcaccattgcactccagcctgggcaacaagagcgaaactcagtctcaaaaaaaaaaaaaaaaaaaagaaaaaggatttaatgaatgaatgatgagaccgttggtgacatctcccaccttctccctctcactccactgcagccacacggggctcctcactgttcccgtagcagcaggcatgtgcccccacagggcctctgtactggctgttcccactgcccgaacaccctcatgcaccatctgcactgtccaatacggccgcctctggccacacatggctactgagcagttgaacatggctggtccaaaccaagatttccaagacgtcgtgtggtaaaaaaaacaacataaaattttgcaaaaatgtttctattgattatgttaaaattatgatgttttaggtatattaggttaaatcagctattttatcaaaatgaatctcgcctgtttgtttttgcttttttttttttttttttgagatggagtctcgctctgtcgcccaggctagagtacaatggcgtggtctcagctcactgcatcactgcaacctctacctcccaggttcaagcgattctcctacctcaccctcccaagtggctgggattacaggcgtgtgccaccacacccagctaatttttgtatttttgtagagacagggtttcaccatgttggccaggctggtctcgaactgctgacctcgtgatctacctgcctcggcctcccaaagtcctgggattacaggtgtgggccactgcgccggccatgtttctcgacttctgctggcaagcatgttccagtatttgcatggctcctagccctcatctccatttctctgcacagatgttatcttccccatgaggtctgccttatacatgaggcctgtattataaagtgcaactgccaattcgccaaccccgttgtttcttctctccagaacactaggcaccatctgatctcctatgccttttccttattgtcagatactgaactctcagatacagttccccttcctccctccagggggcgccatggaacgcagggccctcactggccctggggactgggtgacgtcaggggtgagcctctggtgattggctccctcaccctgcgtaagatcaaagggcctaaaggtcagccccgacacccggagctattgtggctccggccggttgcgcgggccctcggaccctcagagaggcgagggttcgagggctcgagttcgaggccaacctggtccacatgggttgaaaaaaaaattttttttatcgttcccaatataacgacaaaacataaagggaggacgccttgataggaagaaatgacatcttcctaagtgtttttaaattacttcaatgtatctttctttttttttttttttttgggagaccgaggcttgctctgttgcccaggctggagtgcagtggtgtgatcttggctcactgcaacctctgcctcgtcggttcaagggagtctcctatctcagcctcctgagtagctgggattacagtcgcctgccaagagatggggtttcgccatgttgaccaggctggtcttgaacacctggcctcaaatgatccactcgccttggtctcccaaagtggtaggatgacaggcgtgagccaccgcgcccagcctcttctattcttttagagacagcgtctcactctgttgcccaggctggagtgcattgatgtgatgtgtgatcatagctcattgcagccctgaccatccgagctcaagcaatccttctgcctcagcctcctgagtagctggggccgcagatgtgcaccactgcacctggctaatttttaacattttttgtggagccagagtctgtataaaataaagtgtaaatagtaccataaataaagaatacatagtaccattttatagtagtataaaacggacattagaaactctggacttaaagtttaaaaaaatacacaaaagtagttctcaagttctagagacttggagaatccaggaatcaacaatgtcgtggaactcctacagcctttcataaagaatggccctcgaggaaagtggaattgtcagtgggcattgtgttcgtgcctcagctaaacacggcaggaatttatttataacctagtgtaacatcctcgaggcactgttcaattagtcaagcaattgtaaaattctcccagtcttagaaaagatacaggtgtgtgtccctctgctgtggctgtgcactgacgcttcagtaaaagttgccgtctaaaaccaccggcctgcccttgaattgttttgttttgttttgttttgttttgttttgttttgttttgtttttttgattcgcagcctcactctatcacccaggctggagtgcagtgacacgatctctgttcactgcaacctccgcctcccgggttcaagcgattcccctgcctcagcctcctgaacagctgggattacaggcacccgtccccatgcccgggtaatttttgtatatttagtagagatggggtttcaccatg[135 bp omitted]gggctaagcctcaattttggggctcgcctgtgctgcatcagcttcacacctagagaagagagtgaaagagaagggagagccgtccttttgggctgccttgaaataaaggttgacccatgggttcatgtattgtcattcattctcattttctcttcctctctttctctctctcccctgccccttaagttagcttttctacaccctacctggataaggataagaaatagaaggaggggacactttaggatgctacaaaataaaatacaacaacaacaacaataacagcagcagcaacaacaacaacagcaacaaaaggggaagaaacaaatctggccactgcacattcctccttgccaacaaaaagccgcggatgcaaaaagctgcccttcactgcatagacagaagagggcgcgctcgagctatgaatctcgaaaattactcaaaccatcagcctctgcaagaagcaaagtggacggccgggcgcggcggctcactcctggaatcccagcactttgggagcccgaggtgggcggatcacgaggtcaggagatcgagactgttctggctaaaccagtgaaaccccctctctactaaaaaaataagaaaagcgaagtgcatctcccataaacgaggtactgcaggaagaaagcagaaaatgagacccgagtacacacatgcacgcgggcgcgcgcacacacacaccagaagaaatgaaccaagaggaaaggaaacattttcaaataagcatttggagatgggaaaaacaccttgaaacagaaattcataaagcacagaatttttttttaagttaaaaaaggaacaataatagacagaaaatgaatgaaaaattaaatgtcatatcagaagtgaagataaattaaaagtggtcaaaggagaagagatctaaatgcaaacttaagaaggggcaatttttttttttttttttttttgagacgcagcctcactctgtcgcccaggctggagtgcagtggcgtgatcttggctcactgaaacctctgcctcctggattcaagcgattctcctgcctcagcctcccaagtggctgggattacaggcatgagccaccatgcccggcctagagtcatcatggaaattaaacaacctgcttccaaatgacttttgggtaaagactgaatttaaggcagaaataaaaaaattatttgaaactaatgaaaacaaacatacaacatcccagaatctctgggacacagctagaacagtgctcaaaggaagtttctagtgctatatggctacactaagaagctagaaagatctcaaatgaaccgcctaacatcacacctagaggaattagaaaaacaagagcaaatcaaccccaaagctagcagaagaaaaaaagaaaaccaacatcggagctgacctgaatgaaatggagacgtaaaaaaccatacaaaagatcaatgaaacccaaagttgattttttaaaaaaattatttatttattatttattccataaattattggggtacaggtggtgtgtggttacataagctctttagtggtgatttgtgattttggtgcacccatcacctgagcagtatacactacaccctacttgttgtattttatccctcgcccccgccaactcgtccccctaagtccccaaagtccattgtatcattcttacgcctttgcgtcctcatagcttagctcccacatatcagtgagaacatacgatgtttggttttccattcctgagttacttcagttagaataacagtctccggtctcatccaggtcacggcaaatgctgttaattcatacaaggttgatatttttgaaagcataaataacatgggaagaccactagctagattaataaagaaaaaaagacaagatccaaataaacacaatcagaaatgacaaaggtgacattaccactgacccacagatatacaagaaaccctgagactattccacatgcctctatgcacacaaactagaaaactagaagaaatagagaaattcctggaaacataaaacctctcaagattgaaccaggaagaaatggaaaccctgaacaaaccaacgatgagttccaaaattgagttagtcatacaaaacctaccaaccagcacaaaaaaccttagactagacggattcacagtcgaatcctaccagatgtgtaaagaaaagccggcaccaatcctactgaaattattccacacaattgaggaggagcaactgctctctaactcattctatgaggtcagagtcattctgataccgaaacctggcagagacacaacgaaaaaaggaaaataggtaaagtaatacatatgttaatgatcttgatttagccattctacggtatatacatatttcaaaacaatatgtacatgataaatatgtacaatttgtcaattaaaaatatataaaaggaataggaaaaaattcaaatggcacagaatttgaaaggagaagatacagaacaaactccggtgtcttctttattcaactatatatacacacattcaatggactgggagcagtggctcaagcctgtaatcacagcactttgggaggtcaaggcgggcagatcacctgaggtcgggagttcgagaccagcctgaccaacagggagaaaccccagctctactaaaaatacaaaattagccgggcatggtggcgcatgcctgtaatcccagctactcggaggctgaggcaggagaatcgcttgaactcaagaggtggaggttgtggtgagccgagatggcaccattgcactccagcctgggcaacaagagcgaaactcagtctcaaaaaaagaaaaaaaaggatttaatgaatgaatgatgagactgttggttacatctcccaccttctccctctcactccactgcagccacacggggctcctcactgttcccgtagcagcaggcatgtgcccccactgggcctctgtactggctgttcccactgcccgaacaccctcatgcaccatctgcactgtccaatacggccgcctctggccacacatggctactgagcagttgaacatggctggtccaaaccaagatttccaagacgtcgtatggtaaaaaataacataaaatcttgcaaaaatgtttctattgattatgttaaaattatgatgttttaggtatattaggttaaatcagctattttatccaaatgaatctcgcctgtttgtttttgcttttttttttttttttttttttttgagatggaggctcgctctgtcgcccaggctagagtacaatggcgtggtctcggctcactgcatcactgcaacctctacctcccaggttcaagcgattctcctacctcaccctcccaagtggctgggattacaggcgtgtgccaccacacccagctaatttttgtatttttagtagagacagggtttcaccatgttggccaggctggtctcgaactgctgacctcgtgatctacctgcctcggcctcccaaagtcctgggattacaggtgtgggccactgcgccagccatgtttctcgacttctgctggcaagcatgttccagtatttgcatggctcctagccctcatctccatttctctgcacagatgttaccttccccatgaggtctgccttatacatgaggcctgtattataaactgcaactccgcattccccaaccccgttgtttcttctctccagaacactaggcaccatctgatctcctatgccttttccttattgtcagatactgaactctcagatacagttccccttcctccctccagggggcgccatggaacgcagggccctcactggccctggggactgggtgacgacaggggggagcctctggtgattggctccctcaccctgcgtaagatcaaagggactaaaggacagccccgacacccggagccattgtggctcaggccggttgcgcctgccctcgggccctcacggaggcgggggttccagggcacgagttcgaggccagcctggtccacatgggtcggaaaaaaggacttttttttatcgttcccaatataacgacaaaacataaagggaggacgccttgataggaagaaatgacatcttcctaagtgtttttaaattacttccatgtgtcttttttttttttttttttgggagaccgagccttgctctgttgcccaggctggagtgcagtggtgtgatcttcgctcactgcaaactccgcctcgtcggttcaagggagtctcctatctaagcctcctgagtagctgggattacagtcgcctgccaagagatggggtttcgccatgttgaccaggctggtcttgaacacctggcctcaaatgatccactcgccttggtctcccaaagtggtaggatgacaggcgtgagccaccgcgcccagcctcttctattcttttagagacagggtctcactgtgttgcccaggctggagtgcattgatgtgatgtgtgatcatagctcattgcagccctgaccatccgagctcaagcaatccttctgcctcagcctcctgagtagctggggccgcagatgtgcaccactgcacctggctaatttttaacatttttgtggagccagagtctgtataaaataaagtgtaaatagtaccataaataaagaatacatagtaccattttatagtagtataaaacggacattagaaactctgaacttaaaggttaaaaaaatacacaaaagtagttctcaagttctagagacttggagaatccaggaatcaacaatgtcgtggaactcctacagcctttcataaagaatggccctcgaggaaagtggaattgtcagtgggcattgtgttcgtgcctcagctaaacacggcaggaatttatttataacctagtgtaacatcctcgaggcactgttcaattagtcaagcaattgtaaaattctcccagtcttagaaaagatacaggtgtgtgtccctctgctgtggctgtgcactgaggcttcggtaaaggttgccgtctaaaaccaccggcgtgcccttgaattcttttttttttttttttctttttcagacggagtcgcactctatcacccaggctggagtgcagtgacacgatctctgttcactgcaacctccgcctcccgggttcaagcgattcccctgcctcagcctcctgaacagctgggattacaggcacccgtccccatgcccgggtaatttttgtatatttagtagagatggggttttcagcatg[136 bp omitted]ggctaagcctcaattttggggctcgcctgtgctgcatcagcttcacacctagagaagagagtgaaagagaagggagagccgtccttttgggctgccttgaaataaaggttgacccatgggttcatgtattgtcattcattctcattttctcttcctctctttctctctctcccctgccccttaagttagcttttctaaaccctacctggataaggataagaaatagaaggaggggacactttaggatgctacaaaataaaatacaacaacaacaacaataacagcagcagcaacaacaacaacagcaacaaaaggggaagaaacaaatctggccactgcacattcctccttgccaacaaaaagccgcggatgcaaaaagctgcccttcactgcatagacagaagagggcgcgctcgagctatgaatctcggaaattactcaaaccatcagcctctgcaagaagcaaagtggacggccgggcgcggtggctcactcctggaatcccagcactttgggagcccgaggtgggcggatcacgaggtcaggagatcgagactgttctggctaaaccagtgaaaccccctctctactaaaaaaataacaaaagcgaagtgcatctcccataaacgaggtactgcaggaagaaagcagaaaatgagacccgagtacacacatgcacgcgggcgcgcgcacacacacaccagaagaaatgaaccaagaggaaaggaaacattttcaaataagcatttggagatgggaaaaacaccttgaaacagaaattcataaagcacagaatttttttttaagttaaaaaaggaacaataatagacagaaaatgaacgaaaaattaaatgtcatatcagaagtgaagataaattaaaagtggtcaaaggagaagagatctaaatgcaaacttaagaaggggcaattttttttttttttttttttgagacgcagcctcactctgtcgcccgggctggagtgcagtggcgtgatcttggctcactgaaacctctgcctcctggattcaagcgattctcctgcctcagcctcccaagtggctgggattacaggcatgagccaccatgcccggcctagagtcatcatggaaattaaacaacctgcttccaaatgacttttgggtaaagactgaatttaaggcagaaataaaaaaattatttgaaactaatgaaaacaaacatacaacatcccagaatctctgggacacagctagaacagtgctcaaaggaagtttctagtgctatatggctacactaagaagctagaaagatctcaaatgaaccgcctaacatcacacctagaggaattagaaaaacaagagcaaatcaaccccaaagctagcagaagaaaaaaaaaaaccaacatcggagctgacctgaatgaaatggagacgtaaaaaaccatacaaaagatcaatgaaacccaaagttgattttttaaaaaaattatttatttattatttattccataaattattggggtacaggtggtgtgtggttacataagctctttagtgatgatttgtgattttggtgcacccatcacctgggcagtatacactacaccctacttgttgtattttatccctcgcccccgccaactcgtccccctaagtccccaaagtccattgtatcattcttacgcctttgcgtcctcatagcttagctcccacatatcagtgagaacatacgatgtttggttttccattcctgagttacttcacttagaataacagtctccggtctcatccaggtcacggcaaatgctgttaattcatacaaagttgatatttttgaaagcataaataacatgggaagaccactagctagattaataaagaaaaaaagacaagatccaaataaacacaatcagaaatgacaaaggtgacattaccactgacccacagatatacaagaaaccctgagactattccacatgcctctatgcacacaaactagaaaactagaagaaatagagaaattcctggaaacataaaacctctcaagattgaaccaggaagaaatggaaaccctgaacaaaccaacgatgagttccaaaattgagttagtcatacaaaacctaccaaccagcacaaaaaaccttagactagacggattcacagtcgaatcctaccagatgtgtaaagaaaagccggcaccaatcctactgaaattattccacacaattgaggaggagcaactgctctctaactcattctatgaggtcagagtcattctgataccgaaacctggcagagacacaacgaaaaaaggaaaataggtaaagtaatacatatgttaatgatcttgatttagccattctacggtatatacatatttcaaaacaatatgtacatgataaatatgtacaatttgtcaattaaaaatatataaaaggaataggaaaaaattcaaatggcacagaatttgaaaggagaagatacagaacaaactccggtgtcttctttattcaactatatatacacacattcaatggactgggagcagtggctcaagcctgtaatcacagcactttgggaggtcaaggcgggcagatcacctgaggtcgggagttcgagaccagcctgaccaacagggagaaaccccagctctactaaaaatacaaaattagccgggcatggtggcgcatgcctgtaatcccagctactcggaaggctgaggcaggagaatcgcttgaactcaagaggtggaggttgtggtgagccgagatggcaccattgcactccagcctgggcaacaagagcgaaactcagtctcaaaaaaagaaaaaaaaggatttaatgaatgaatgatgagactgttggttacatctcccaccttctccctctcactccactgcagccacacggggctcctcactgttcccgtagcagcaggcatgtgcccccactgggcctctgtactggctgttcccactgcccgaacaccctcatgcaccatctgcactgtccaatacggccgcctctggccacacatggctactgagcagttgaacatggctggtccaaaccaacatttccaagacgtcgtatggtaaaaaataacataaaatcttgcaaaaatgtttctattgattatgttaaaattatgatgttttaggtatattaggttaaatcagctattttatccaaatgaatctcgcctgtttgtttttgctttttttttttttttttttttttgagatggaggctcgctctgtcgcccaggctagagtacaatggcgtggtctcggctcactgcatcactgcaacctctatctcccaggttcaagcgattctcctacctcaccctcccaagtggctgggattacaggcgtgtgccaccacacccagctaatttttgtatttttagtagagacagggtttcaccatgttggccaggctggtctcgaactgctgacctcgtgatctacctgcctcggcctcccaaagtcctgggattacaggtgtgggccactgcgccggccatgtttctcgacttctgctggcaagcatgttccagtatttgcatggctcctagccctcatctccatttctctgcacagatgttaccttccccatgaggtctgccttatacatgaggcctgtattataaagtgcaactccgcattccccaaccccgttgtttcttctctccagaacactaggcaccatctgatctcctatgccttttccttattgtcagatactgaactctcagatacagttccccttcctccctccagggggcgccatggaacgcagggccctcactggccctggggactgggtgacgacaggggggagcctctggtgattggctccctcaccctgcgtaagatcaaagggactaaaggacagccccgacacccggagccattgtggctcaggccggttgcgcctgccctcgggccctcacggaggcgggggttccagggcacgagttcgaggccagcctggtccacatgggtcggaaaaaaggattttttttatcgttcccaatataacgacaaaacgtaaagggaggacgccttgataggaagaaatgacatcttcctaagtgtttttaaattacttccatgtgtctttttttttttttttttttgggagaccgagccttgctctgttgcccaggctggagtgcagtggtgtgatcttcgctcactgcaacctccgcctcgtcggttcaagggagtctcctatctaagcctcctgagtagctgggattacagtcgcctgccaagagatggggtttcgccatgttgaccaggctggtcttgaacacctggcctcaaatgatccactcgccttggtctcccaaagtggtaggatgacaggcgtgagccaccgcgcccagcctcttctattcttttagagacagcgtctcactctgttgcccaggctggagtgcattgatgtgatgtgtgatcatagctcattgcagccctgaccatccgagctcaagcaatccttctgcctcagcctcctgagtagctggggccgcagatgtgcaccactgcacctggctaatttttaacatttttgtggagccagagtctgtataaaataaagtgtaaatagtaccataaataaagaatacatagtaccattttatagtagtataaaacggacattagaaactcagaacttaaaggttaaaaaaatacacaaaagtagttctcaagttctagagacttggagaatccaggaatcaacaatgtcgtggaactcctacagcctttcataaagaatggccctcgaggaaagtggaattgtcagtgggcattgtgttcgtgcctcagctaaacacggcaggaatttatttataacctagtgtaacatcctcgaggcactgttcaattagtcaagcaattgtaaaattctcccagtcttagaaaagatacaggtgtgtgtccctctgctgtggctgtgcactgaggcttcggtaaaggttgccgtctaaaaccaccggcgtgcccttgaattctttttttttttttttttctttttcagacggagtcgcactctatcacccaggctggagtgcagtgacacgatctctgttcactgcaacctccgcctcccgggttcaagcgattcccctgcctcagcctcctgaacagctgggattacaggcacccgtccccatgcccgggtaatttttgtatatttagtagagatggggtttcaccatg[135 bp omitted]gagctaagcctcaattttggggctcgcctgtgctgcatcagcttcacacctagagaagagagtgaaagagaagggagagccgtccttttgggctgccttgaaataaaggttgacccatgggttcatgtattgtcattcattctcattttctcttcctctctttctctctctcccctgccccttaagttagcttttctacaccctacctggataaggataagaaatagaaggaggggacactttaggatgctacaaaataaaatacaacaacaacaacaataacagcagcagcaacaacaacaacagcaacaaaaggggaagaaacaaatctggccactgcacattcctccttggcaacaaaaagccgtggatgcaaaaagctgcccttcactgcatagacagaacagggcgcgctcgagctatgaatctcggaaattactcaagccatcagcctctgcaagaagcaaagtggacggccgggcgcggcggctcactcctggaatcccagcactttgggagcccgaggtgggcggatcacgaggtcaggagatcgagactgttctggctaaaccagtgaaaccccctctctactaaaaaaataacaaaagcgaagtgcatctcccataaacgaggtactgcaggaagaaagcagaaaatgagacccgagtacacacatgcacgcgggcgtgcgcacacacacaccagaagaaatgaaccaagaggaaaggaaatattttcaagtaagcatttggagatgggaaaaacaccttgaaacagaaattcataaagtacacacatgtttttttttttaagttaaaagaggaacaataataaacaggcagaaaatgaataaaaaataaaatgtcatatcagaagtgaagataaattaaaagtggtcaaaggagaagagatctaaatgcaaacttaagaaggggcaattttttttttttttttttgagacgcagcctcactctgtcgcccgggctggagtgcagtggcgtgatcttggctcactgaaacctctgcctcctggattcaagcgattctcctgcctcagcctcccaagtggctgggattacaggcatgagccaccatgcccggcctagagtcatcatggaaattaaacaatgaaacccaaagttgattttttaaaaaaattatttattatttattccataaattattggggtacaggtggtatgtggttacataagctctttagtggtgatttgtgattttggtgcacccatcacctgagcagtatacactaccccctatttgttgtcttttatccctcgccctcgccaactcgtccccctaagtccccaaagtccattgtatcattcttatgcctttgtgtcctcatagcttaggtcccacatatcagtgagaacatacgatgtttggttttccattcctgagttacttcacttagaataatactctccggtctcatccaggtcactgcaaatgctgttaattcatacaaagttgatatttttggaagcataaataacatggaaagaccactagctagattaataaagaaaaaaagacaagatccaaataaacacaatcagaaatgacagaggtgacattaccactgacccacagacatacaagaaaccctgagactattccacatgcctctatgcacaaaaactagaaaactagaagaaatagataaattcctggaaacataaaacctctcaagattgaaccaggaagaaatggaaaccctgaacaaaccaacgatgagttccaaaattgagttagtcatacaagacctaccaaccagcgcaaaaaaccttagactagacggattcacagtcgaattctaccagatgtgtaaagaaaagccggcaccaatcctactgaaattattccacacaattgaggaggagcaactgctctctaactcattctatgaggtcagagtcattctgataccgaaacctggcagagacacaacgaaaaaaggaaaataggtaaagtaatacatatgttaatgatcttgatttagccattctacggtatatacatatttcaaaacaatatgtacatgataaatatgtacaatttgtcaattaaaaatatataaaaggaagaggaaaaaattcaaatggcgtagaatttgaaaggagaagatacagaacaaactccagtgtcttattattcaactatatatacacacgttcaatggaccgggagcagtggctcaagcctgtaatcacagcactttgggaggtcaaggcgggcagatcacctgaggtcgggagttcgagaccagcctgaccaacagagagaaaccccagctctactaaaaatacaaaattagccgggcatggtgacgcatgcctgtaatcccagctactcgggagggtgaggcaggagaatcgcttgaactcaagaggtggaggttgtggtgagccgagatggcaccattgcactccagcctgggcaacaagagcgaaactcagtctcaaaaaaaaaaaaaaaaaaagaaaaaggatttaatgaatgaatgatgagaccgttggtgacatctcccaccttctccctctcactccactgcagccacacggggctcctcactgttcccgtagaagcaggcatgtgcccccacagggcctctgtactggctgttcccactgcccgaacaccctcatgcaccatctgcactgtccaatacggccgcctctggccacacatggctactgagcagttgaacatggctggtccaaaccaagatttccaagacgtcgtgtggtaaaaaaaacaacataaaattttgcaaaaatgtttctattgattatgttaaaattatgatgttttaggtatattaggttaaatcagctattttatcaaaatgaatctcgcctgtttgtttttgctttttttttttttttttgagatggagtctcgctctgtcgcccaggctagagtacaatggcgtggtctcagctcactgcatcactgcaacctctacctcccaggttcaagcgattctcctacctcaccctcccaagtggctgggattacaggcgtgtgccaccacacccagctaatttttgtatttttgtagagacagggtttcaccatgttggccaggctggtctcgaactgctgacctcgtgatctacctgcctcggcctcccaaagtcctgggattacaggtgtgggccactgcgccggccatgtttctcgacttctgctggcaagcatgttccagtatttgcatggctcctagccctcatctccatttctctgcacagatgttatcttccccatgaggtctgccttatacatgaggcctgtattataaagtgcaactgccaattcgccaaccccgttgtttcttctctccagaacactaggcaccatctgatctcctatgccttttccttattgtcagatactgaactctcagatacagttccccttcctccctccagggggcgccatggaacgcagggccctcactggccctggggactgggtgacgtcaggggtgagcctctggtgattggctccctcaccgtgcgtaagatcaaagggcctaaaggtcagccccgacacccggagctattgtggctccggccggttgcgcgggccctcggaccctcagagaggcgagggttcgagggctcgagttcgaggccaacctggtccacatgggttgaaaaaaaaattttttttatcgttcccaatataacgacaaaacataaagggaggacgccttgataggaagaaatgacatcttcctaagtgtttttaaattacttcaatgtatctttctttttttttttttttttgggagaccgaggcttgctctgttgcccaggctggagtgcagtggtgtgatcttggctcactgcaacctctgcctcgtcggttcaagggagtctcctatctcagcctcctgagtagctgggattacagtcgcctgccaagagatggggtttcgccatgttgaccaggctggtcttgaacacctggcctcaaatgatccactcgccttggtctcccaaagtggtaggatgacaggcgtgagccaccgcgcccagcctcttctattcttttagagacagcgtctcactctgttgcccaggctggagtgcattgatgtgatgtgtgatcatagctcattgcagccctgaccatccgagctcaagcaatccttctgcctcagcctcctgagtagctggggccgcagatgtgcaccactgcacctggctaatttttaacattttttgtggagccagagtctgtataaaataaagtgtaaatagtaccataaataaagaatacatagtaccattttatagtagtataaaacggacattagaaactctggacttaaagtttaaaaaaatacacaaaagtagttctcaagttctagagacttggagaatccaggaatcaacaatgtcgtggaactcctacagcctttcataaagaatggccctcgaggaaagtggaattgtcagtgggcattgtgttcgtgcctcagctaaacacggcaggaatttatttataacctagtgtaacatcctcgaggcactgttcaattagtcaagcaattgtaaaattctcccagtcttagaaaagatacaggtgtgtgtccctctgctgtggctgtgcactgacgcttcagtaaaagttgccgtctaaaaccaccggcctgcccttgaattgttttgttttgttttgttttgttttgtttttttgattcgcagcctcactctatcacccaggctggagtgcagtgacacgatctctgttcactgcaacctccgcctcccgggttcaagcgattcccctgcctcagcctcctgaacagctgggattacaggcacccgtccccatgcccgggtaatttttgtatatttagtagagatggggtttcaccatg[135 bp omitted]gggctaagcctcaattttggggctcgcctgtgctgcatcagcttcacacctagagaagagagtgaaagagaagggagagccgtccttttgggctgccttgaaataaaggttgacccatgggttcatgtattgtcattcattctcattttctcttcctctctttctctctctcccctgccccttaagttagcttttctacaccctacctggataaggataagaaatagaaggaggggacactttaggatgctacacaataaaatacaacaacaacaacaataacagcagcagcaacaacaacaacagcaacaaaaggggaagaaacaaatctggccactgcacattcctccttgccaacaaaaagccgcggatgcaaaaagctgcccttcactgcatagacagaagagggcgcgctcgagctatgaatctcgaaaattactcaaaccatcagcctctgcaagaagcaaagtggacggccgggcgcggcggctcactcctggaatcccagcactttgggagcccgaggtgggcggatcacgaggtcaggagatcgagactgttctggctaaaccagtgaaaccccctctctactaaaaaaataagaaaagcgaagtgcatctcccataaacgaggtactgcaggaagaaagcagaaaatgagacccgagtacacacatgcacgcgggcgcgcgcacacacacaccagaagaaatgaaccaagaggaaaggaaacattttcaaataagcatttggagatgggaaaaacaccttgaaacagaaattcataaagcacagaatttttttttaagttaaaaaaggaacaataatagacagaaaatgaatgaaaaattaaatgtcatatcagaagtgaagataaattaaaagtggtcaaaggagaagagatctaaatgcaaacttaagaaggggcaatttttttttttttttttttttgagacgcagcctcactctgtcgcccaggctggagtgcagtggcgtgatcttggctcactgaaacctctgcctcctggattcaagcgattctcctgcctcagcctcccaagtggctgggattacaggcatgagccaccatgcccggcctagagtcatcatggaaattaaacaacctgcttccaaatgacttttgggtaaagactgaatttaaggcagaaataaaaaaattatttgaaactaatgaaaacaaacatacaacatcccagaatctctgggacacagctagaacagtgctcaaaggaagtttctagtgctatatggctacactaagaagctagaaagatctcaaatgaaccgcctaacatcacacctagaggaattagaaaaacaagagcaaatcaaccccaaagctagcagaagaaaaaaagaaaaccaacatcggagctgacctgaatgaaatggagacgtaaaaaaccatacaaaagatcaatgaaacccaaagttgattttttaaaaaaattatttatttattatttattccataaattattggggtacaggtggtgtgtggttacataagctctttagtggtgatttgtgattttggtgcacccatcacctgagcagtatacactacaccctacttgttgtattttatccctcgcccccgccaactcgtccccctaagtccccaaagtccattgtatcattcttacgcctttgcgtcctcatagcttagctcccacatatcagtgagaacatacgatgtttggttttccattcctgagttacttcagttagaataacagtctccggtctcatccaggtcacggcaaatgctgttaattcatacaaggttgatatttttgaaagcataaataacatgggaagaccactagctagattaataaagaaaaaaagacaagatccaaataaacacaatcagaaatgacaaaggtgacattaccactgacccacagatatacaagaaaccctgagactattccacatgcctctatgcacacaaactagaaaactagaagaaatagagaaattcctggaaacataaaacctctcaagattgaaccaggaagaaatggaaaccctgaacaaaccaacgatgagttccaaaattgagttagtcatacaaaacctaccaaccagcacaaaaaaccttagactagacggattcacagtcgaatcctaccagatgtgtaaagaaaagccggcaccaatcctactgaaattattccacacaattgaggaggagcaactgctctctaactcattctatgaggtcagagtcattctgataccgaaacctggcagagacacaacgaaaaaaggaaaataggtaaagtaatacatatgttaatgatcttgatttagccattctacggtatatacatatttcaaaacaatatgtacatgataaatatgtacaatttgtcaattaaaaatatataaaaggaataggaaaaaattcaaatggcacagaatttgaaaggagaagatacagaacaaactccggtgtcttctttattcaactatatatacacacattcaatggactgggagcagtggctcaagcctgtaatcacagcactttgggaggtcaaggcgggcagatcacctgaggtcgggagttcgagaccagcctgaccaacagggagaaaccccagctctactaaaaatacaaaattagccgggcatggtggcgcatgcctgtaatcccagctactcggaaggctgaggcaggagaatcgcttgaactcaagaggtggaggttgtggtgagccgagatggcaccattgcactccagcctgggcaacaagagcgaaactcagtctcaaaaaaagaaaaaaaaggatttaatgaatgaatgatgagactgttggttacatctcccaccttctccctctcactccactgcagccacacggggctcctcactgttcccgtagcagcaggcatgtgcccccactgggcctctgtactggctgttcccactgcccgaacaccctcatgcaccatctgcactgtccaatacggccgcctctggccacacatggctactgagcagttgaacatggctggtccaaaccaacatttccaagacgtcgtatggtaaaaaataacataaaatcttgcaaaaatgtttctattgattatgttaaaattatgatgttttaggtatattaggttaaatcagctattttatccaaatgaatctcgcctgtttgtttttgctttttttttttttttttttttttgagatggaggctcgctctgtcgcccaggctagagtacaatggcgtggtctcggctcactgcatcactgcaacctctacctcccaggttcaagcgattctcctacctcaccctcccaagtggctgggattacaggcgtgtgccaccacacccagctaatttttgtatttttagtagagacagggtttcaccatgttggccaggctggtctcgaactgctgacctcgtgatctacctgcctcggcctcccaaagtcctgggattacaggtgtgggccactgcgccagccatgtttctcgacttctgctggcaagcatgttccagtatttgcatggctcctagccctcatctccatttctctgcacagatgttaccttccccatgaggtctgccttatacatgaggcctgtattataaactgcaactccgcattccccaaccccgttgtttcttctctccagaacactaggcaccatctgatctcctatgccttttccttattgtcagatactgaactctcagatacagttccccttcctccctccagggggcgccatggaacgcagggccctcactggccctggggactgggtgacgacaggggggagcctctggtgattggctccctcaccctgcgtaagatcaaagggactaaaggacagccccgacacccggagccattgtggctcaggccggttgcgcctgccctcgggccctcacggaggcgggggttccagggcacgagttcgaggccagcctggtccacatgggtcggaaaaaaggacttttttttatcgttcccaatataacgacaaaacataaagggaggacgccttgataggaagaaatgacatcttcctaagtgtttttaaattacttccatgtgtcttttttttttttttttttgggagaccgagccttgccctgttgcccaggctggagtgcagtggtgtgatcttcgctcactgcaacctccgcctcgtcggttcaagggagtctcctatctaagcctcctgagtagctgggattacagtcgcctgccaagagatggggtttcgccatgttgaccaggctggtcttgaacacctggcctcaaatgatccactcgccttggtctcccaaagtggtaggatgacaggcgtgagccaccgcgcccagcctcttctattcttttagagacagggtctcactgtgttgcccaggctggagtgcattgatgtgatgtgtgatcatagctcattgcagccctgaccatccgagctcaagcaatccttctgcctcagcctcctgagtagctggggccgcagatgtgcaccactgcacctggctaatttttaacatttttgtggagccagagtctgtataaaataaagtgtaaatagtaccataaataaagaatacatagtaccattttatagtagtataaaacggacattagaaactctgaacttaaaggttaaaaaaatacacaaaagtagttctcaagttctagagacttggagaatccaggaatcaacaatgtcgtggaactcctacagcctttcataaagaatggccctcgaggaaagtggaattgtcagtgggcattgtgttcgtgcctcagctaaacacggcaggaatttatttataacctagtgtaacatcctcgaggcactgttcaattagtcaagcaattgtaaaattctcccagtcttagaaaagatacaggtgtgtgtccctctgctgtggctgtgcactgaggcttcggtaaaggttgccgtctaaaaccaccggcgtgcccttgaattcttttttttttttttttctttttcagacggagtcgcactctatcacccaggctggagtgcagtgacacgatctctgttcactgcaacctccgcctcccgggttcaagcgattcccctgcctcagcctcctgaacagctgggattacaggcacccgtccccatgcccgggtaatttttgtatatttagtagagatggggtttcaccatg[135 bp omitted]gggctaagcctcaattttggggctcgcctgtgctgcatcagcttcacacctagagaagagagtgaaagagaagggagagccgtccttttgggctgccttgaaataaaggttgacccatgggttcatgtattgtcattcattctcattttctcttcctctctttctctctctcccctgccccttaagttagcttttctacaccctacctggataaggataagaaatagaaggaggggacactttaggatgctacacaataaaatacaacaacaacaacaataacagcagcagcaacaacaacaacagcaacaaaaggggaagaaacaaatctggccactgcacattcctccttgccaacaaaaagccgcggatgcaaaaagctgcccttcactgcatagacagaacagggcgcgctcgagctatgaatctcgaaaattactcaaaccatcagcctctgcaagaagcaaagtggacggccgggcgcggcggctcactcctggaatcccagcactttgggagcccgaggtgggcggatcacgaggtcaggagatcgagactgttctggctaaaccagtgaaaccccctctctactaaaaaaataagaaaagcgaagtgcatctcccataaacgaggtactgcaggaagaaagcagaaaatgagacccgagtacacacatgcacgcgggcgcgcgcacacacacaccagaagaaatgaaccaagaggaaaggaaacattttcaaataagcatttggagatgggaaaaacaccttgaaacagaaattcataaagcacagaatttttttttaagttaaaaaaggaacaataatagacagaaaatgaatgaaaaattaaatgtcatatcagaagtgaagataaattaaaagtggtcaaaggagaagagatctaaatgcaaacttaagaaggggcaatttttttttttttttttttgagacgcagcctcactctgtcgcccaggctggagtgcagtggcgtgatcttggctcactgaaacctctgcctcctggattcaagcgattctcctgcctcagcctcccaagtggctgggattacaggcatgagccaccatgcccggcctagagtcatcatggaaattaaacaacctgcttccaaatgacttttgggtaaagactgaatttaaggcagaaataaaaaaattatttgaaactaatgaaaacaaacatacaacatcccagaatctctgggacacagctagaacagtgctcaaaggaagtttctagtgctatatggctacactaagaagctagaaagatctcaaatgaaccgcctaacatcacacctagaggaattagaaaaacaagagcaaatcaaccccaaagctagcagaagaaaaaaagaaaaccaacatcggagctgacctgaatgaaatggagacgtaaaaaaccatacaaaagatcaatgaaacccaaagttgattttttaaaaaaattatttatttattatttattccataaattattggggtacaggtggtgtgtggttacataagctctttagtggtgatttgtgattttggtgcacccatcacctgagcagtatacactacaccctacttgttgtattttatccctcgcccccgccaactcgtccccctaagtccccaaagtccattgtatcattcttacgcctttgcgtcctcatagcttagctcccacatatcagtgagaacatacgatgtttggttttccattcctgagttacttcagttagaataacagtctccggtctcatccaggtcacggcaaatgctgttaattcatacaaagttgatatttttgaaagcataaataacatgggaagaccactagctagattaataaagaaaaaaagacaagatccaaataaacacaatcagaaatgacaaaggtgacattaccactgacccacagatatacaagaaaccctgagactattccacatgcctctatgcacacaaactagaaaactagaagaaatagagaaattcctggaaacataaaacctctcaagattgaaccaggaagaaatggaaaccctgaacaaaccaacgatgagttccaaaattgagttagtcatacaaaacctaccaaccagcacaaaaaaccttagactagacggattcacagtcgaatcctaccagatgtgtaaagaaaaggcggcaccaatcctactgaaattattccacacaattgaggaggagcaactgctctctaactcattctatgaggtcagagtcattctgataccgaaacctggcagagacacaacgaaaaaaggaaaataggtaaagtaatacatatgttaatgatcttgatttagccattctacggtatatacatatttcaaaacaatatgtacatgataaatatgtacaatttgtcaattaaaaatatataaaaggaagaggaaaaaattcaaatggcgtagaatttgaaaggagaagatacagaacaaactccagtgtcttattattcaactatatatacacacgttcaatggaccgggagcagtggctcaagcctgtaatcacagcactttgggaggtcaaggcgggcagatcacctgaggtcgggagttcgagaccagcctgaccaacagagagaaaccccagctctactaaaaatacaaaattagccgggcatggtgacgcatgcctgtaatcccagctactcgggagggtgaggcaggagaatcgcttgaactcaagaggtggaggttgtggtgagccgagatggcaccattgcactccagcctgggcaacaagagcgaaactcagtctcaaaaaaaaaaaaaaaaagaaaaaggatttaatgaatgaatgatgagaccgttggtgacatctcccaccttctccctctcactccactgcagccacacggggctcctcactgttcccgtagcagcaggcatgtgcccccacagggcctctgtactggctgttcccactgcccgaacaccctcatgcaccatctgcactgtccaatacggccgcctctggccacacatggctactgagcagttgaacatggctggtccaaaccaagatttccaagacgtcgtgtggtaaaaaaaacaacataaaattttgcaaaaatgtttctattgattatgttaaaattatgatgttttaggtatattaggttaaatcagctattttataaaaatgaatctcgcctgtttgtttttgctttttttttttttttttttttttttttgagatggagtctcgctctgtcgcccaggctagagtacaatggcgtggtctcagctcactgcatcactgcaacctctacctcccaggttcaagcgattctcctacctcaccctcccaagtgggtgggattacaggcgtgtgccaccacacccagctaatttttgtatttttgtagagacagggtttcaccatgttggccaggctggtctcgaactgctgacctcgtgatctacctgcctcggcctcccaaagtcctgggattacaggtgtgggccactgcgccggccatgtttctcgacttctgctggcaagcatgttccagtatttgcatggctcctagccctcatctccatttctctgcacagatgttatcttccccatgaggtctgccttatacatgaggcctgtattataaagtgcaactgccaattcgccaaccccgttgtttcttctctccagaacactaggcaccatctgatctcctatgccttttccttattgtcagatactgaactctcagatacagttccccttcatccctccagggggcgccatggaacgcagggccctcactggccctggggactgggtgacgtcaggggtgagcctctggtgattggctccctcaccctgcgtaagatcaaagggcctaaaggtcagccccgacacccggagctattgtggctccggccggttgcgcgggccctcggaccctcagagaggcgagggttcgagggcacgagttcgaggccaacctggtccacatgggttgaaaaaaaaattttttttatcgttcccaatataacaacaaaacataaagggaggacgccttgataggaagaaatgacatcttcctaagtgtttttaaattacttcaatgtatctttctttttttttttttttttttgggagaccgaggcttgctctgttgcccaggctggagtgcagtggtgtgatcttggctcactgcaacctctgcctcgtcggttcaagggagtctcctatctcagcctcctgagtagctgggattacagtcgcctgccaagagatggggtttcgccatgttgaccaggctggtcttgaacacctggcctcaaatgatccactcgccttggtctcccaaagtggtaggatgacaggcgtgagccaccgcgcccagcctcttctattcttttagagacagcgtctcactctgttgcccaggctggagtgcattgatgtgatgtgtgatcatagctcattgcagccctgaccatccgagctcaagcaatccttctgcctcagcctcctgagtagctggggccgcagatgtgcaccactgcacctggctaatttttaacattttttgtggagccagagtctgtataaaataaagtgtaaatagtaccataaataaagaatacatagtaccattttatagtagtataaaacggacattagaaactctggacttaaagtttaaaaaaatacacaaaagtagttctcaagttctagagacttggagaatccaggaatcaacaatgtcgtggaactcctacagcctttcataaagaatggccctcgaggaaagtggaattgtcagtgggcattgtgttcgtgcctcagctaaacacggcaggaatttatttataacctagtgtaacatcctcgaggcactgttcaattagtcaagcaattgtaaaattctcccagtcttagaaaagatacaggtgtgtgtccctctgctgtggctgtgcactgacgcttcagtaaaagttgccgtctaaaaccaccggcctgcccttgaattgttttgttttgttttgttttgttttgttttgttttgttttgtttttttgattcgcagcctcactctatcacccaggctggagtgcagtgacacgatctctgttcactgcaacctccgcctcccgggttcaagcgattcccctgcctcagcctcctgaacagctgggattacaggcacccgtccccatgcccgggtaatttttgtatatttagtagagatggggtttcaccatg[136 bp omitted]ggctaagcctcaattttggggctcgcctgtgctgcatcagcttcacacctagagaagagagtgaaagagaagggagagccgtccttttgggctgccttgaaataaaggttgacccatgggttcatgtattgtcattcattctcattttctcttcctctctttctctctctcccctgccccttaagttagcttttctacaccctacctggataaggataagaaatagaaggaggggacactttaggatgctacaaaataaaatacaacaacaacaacaataacagcagcagcaacaacaacaacagcaacaaaaggggaagaaacaaatctggccactgcacattcctccttggcaacaaaaagccgcggatgcaaaaagctgcccttcactgcatagacagaacagggcgcgctcgagctatgaatctcggaaattactcaaaccatcagcctctgcaagaagcaaagtggacggccgggcgcggtggctcactcctggaatcccagcactttgggagcccgaggtgggcggatcacgaggtcaggagatcgagactgttctggctaaaccagtgaaaccccctctctactaaaaaaataacaaaagcgaagtgcatctcccataaacgaggtactgcaggaagaaagcagaaaatgagacccgagtacacacatgcacgcgggcgcgcgcacacacacaccagaagaaatgaaccaagaggaaaggaaacattttcaaataagcatttggagatgggaaaaacaccttgaaacagaaattcataaagcacagaatttttttttaagttaaaaaaggaacaataatagacagaaaatgaacgaaaaattaaatgtcatatcagaagtgaagataaattaaaagtggtcaaaggagaagagatctaaatgcaaacttaagaaggggcaatttttttttttttttttttttttgagacgcagcctcactctgtcgcccgggctggagtgcagtggcgtgatcttggctcactgaaacctctgcctcctggattcaagcgattctcctgcctcagcctcccaagtggctgggattacaggcatgagccaccatgcccggcctagagtcatcatggaaattaaacaacctgcttccaaatgacttttgggtaaagactgaatttaaggcagaaataaaaaaattatttgaaactaatgaaaacaaacatacaacatcccagaatctctgggacacagctagaacagtgctcaaaggaagtttctagtgctatatggctacactaagaagctagaaagatctcaaatgaaccgcctaacatcacacctagaggaattagaaaaacaagagcaaatcaaccccaaagctagcagaagaaaaaaaaaaaccaacatcggagctgacctgaatgaaatggagacgtaaaaaaccatacaaaagatcaatgaaacccaaagttgattttttaaaaaaattatttatttattatttattccataaattattggggtacaggtggtgtgtggttacataagctctttagtggtgatttgtgattttggtgcacccatcacctgagcagtatacactacaccctacttgttgtattttatccctcgcccccgccaactcgtccccctaagtccccaaagtccattgtatcattcttacgcctttgcgtcctcatagcttagctcccacatatcagtgagaacatacgatgtttggttttccattcctgagttacttcagttagaataacagtctccggtctcatccaggtcacggcaaatgctgttaattcatacaaagttgatatttttgaaagcataaataacatgggaagaccactagctagattaataaagaaaaaaagacaagatccaaataaacacaatcagaaatgacaaaggtgacattaccactgacccacagatatacaagaaaccctgagactattccacatgcctctatgcacacaaactagaaaactagaagaaatagagaaattcctggaaacataaaacctctcaagattgaaccaggaagaaatggaaaccctgaacaaaccaacgatgagttccaaaattgagttagtcatacaaaacctaccaaccagcacaaaaaaccttagactagacggattcacagtcgaatcctaccagatgtgtaaagaaaaggcggcaccaatcctactgaaattattccacacaattgaggaggagcaactgctctctaactcattctatgaggtcagagtcattctgataccgaaacctggcagagacacaacgaaaaaaggaaaataggtaaagtaatacatatgttaatgatcttgatttagccattctacggtatatacatatttcaaaacaatatgtacatgataaatatgtacaatttgtcaattaaaaatatataaaaggaataggaaaaaattcaaatggcacagaatttgaaaggagaagatacagaacaaactccggtgtcttctttattcaactatatatacacacattcaatggactgggagcagtggctcaagcctgtaatcacagcactttgggaggtcaaggcgggcagatcacctgaggtcgggagttcgagaccagcctgaccaacagggagaaaccccagctctactaaaaatacaaaattagccgggcatggtggcgcatgcctgtaatcccagctactcggaaggctgaggcaggagaatcgcttgaactcaagaggtggaggttgtggtgagccgagatggcaccattgcactccagcctgggcaacaagagcgaaactcagtctcaaaaaaagaaaaaaaaggatttaatgaatgaatgatgagactgttggttacatctcccaccttctccctctcactccactgcagccacacggggctcctcactgttcccgtagcagcaggcatgtgcccccactgggcctctgtactggctgttcccactgcccgaacaccctcatgcaccatctgcactgtccaatacggccgcctctggccacacatggctactgagcagttgaacatggctggtccaaaccaacatttccaagacgtcgtatggtaaaaaataacataaaatcttgcaaaaatgtttctattgattatgttaaaattatgatgttttaggtatattaggttaaatcagctattttatccaaatgaatctcgcctgtttgtttttgctttttttttttttttttttttttgagatggaggctcgctctgtcgcccaggctagagtacaatggcgtggtctcggctcactgcatcactgcaacctctacctcccaggttcaagcgattctcctacctcaccctcccaagtggctgggattacaggcgtgtgccaccacacccagctaatttttgtatttttagtagagacagggtttcaccatgttggccaggctggtctcgaactgctgacctcgtgatctacctgcctcggcctcccaaagtcctgggattacaggtgtgggccactgcgccagccatgtttctcgacttctgctggcaagcatgttccagtatttgcatggctcctagccctcatctccatttctctgcacagatgttaccttccccatgaggtctgccttatacatgaggcctgtattataaactgcaactccgcattccccaaccccgttgtttcttctctccagaacactaggcaccatctgatctcctatgccttttccttattgtcagatactgaactctcagatacagttccccttcctccctccagggggcgccatggaacgcagggccctcactggccctggggactgggtgacgacaggggggagcctctggtgattggctccctcaccctgcgtaagatcaaagggactaaaggacagccccgacacccggagccattgtggctcaggcaggttgcgcctgccctcgggccctcacggaggcgggggttccagggcacgagttcgaggccagcctggtccacatgggtcggaaaaaaggacttttttttatcgttcccaatataacgacaaaacataaagggaggacgccttgataggaagaaatgacatcttcctaagtgtttttaaattacttccatgtgtcttttttttttttttttttgggagaccgagccttgctctgttgcccaggctggagtgcagtggtgtgatcttcgctcactgcaacctccgcctcgtcggttcaagggagtctcctatctaagcctcctgagtagctgggattacagtcgcctgccaagagatggggtttcgccatgttgaccaggctggtcttgaacacctggcctcaaatgatccactcgccttggtctcccaaagtggtaggatgacaggcgtgagccaccgcgcccagcctcttctattcttttagagacagggtctcactgtgttgcccaggctggagtgcattgatgtgatgtgtgatcatagctcattgcagccctgaccatccgagctcaagcaatccttctgcctcagcctcctgagtagctggggccgcagatgtgcaccactgcacctggctaatttttaacattttttgtggagccagagtctgtataaaataaagtgtaaatagtaccataaataaagaatacatagtaccattttatagtagtataaaacggacattagaaactctggacttaaagtttaaaaaaatacacaaaagtagttctcaagttctagagacttggagaatccaggaatcaacaatgtcgtggaactcctacagcctttcataaagaatggccctcgaggaaagtggaattgtcagtgggcattgtgttcgtgcctcagctaaacacgacaggaatttatttataacctagtgtaacatcctcgaggcactgttcaattagtcaagcaattgtaaaattctcccagtcttagaaaagatacaggtgtgtgtccctctgctgtggctgtgcactgacgcttcagtaaaagttgccgtctaaaaccaccggcctgcccttgaattgttttgttttgttttgttttgtttttttgattcgcagcctcactctatcacccaggctggagtgcagtgacacgatctctgttcactgcaacctccgcctcccgggttcaagcgattcccctgcctcagcctcctgaacagctgggattacaggcacccgtccccatgcccgggtaatttttgtatatttagtagagatggggtttcaccatg[136 bp omitted]ggctaagcctcaattttggggctcgcctgtgctgcatcagcttcacacctagagaagagagtgaaagagaagggagagccgtccttttgggctgccttgaaataaaggttgacccatgggttcatgtattgtcattcattctcattttctcttcctctctttctctctctcccctgccccttaagttagcttttctacaccctacctggataaggataagaaatagaaggaggggacactttaggatgctacaaaataaaatacaacaacaacaataacagcagcagcaacaacaacaacagcaacaaaaggggaagaaacaaatctggccactgcacattcctccttgccaacaaaaagccgcggatgcaaaaagctgcccttcactgcatagacagaacagggcgcgctcgagctatgaatctcggaaattactcaaaccatcagcctctgcaagaagcaaagtggacggccgggcgcggtggctcactcctggaatcccagcactttgggagcccgaggtgggcggatcacgaggtcaggagatcgagactgttctggctaaaccagtgaaaccccctctctactaaaaaaataacaaaagcgaagtgcatctcccataaacgaggtactgcaggaagaaagcagaaaatgagacccgagtacacacatgcacgcgggcgtgcgcacacacacaccagaagaaatgaaccaagaggaaaggaaatattttcaagtaagcatttggagatgggaaaaacaccttgaaacagaaattcataaagtacacacatgttttttttttaagttaaaagaggaacaataataaacaggcagaaaatgaataaaaaataaaatgtcatatcagaagtgaagataaattaaaagtggtcaaaggagaagagatctaaatgcaaacttaagaaggggcaatttttttttttttttttttgagacgcagcctcactctgtcgcccgggctggagtgcagtggcgtgatcttggctcactgaaacctctgcctcctggattcaagcgattctcctgcctcagcctcccaagtggctgggattacaggcatgagccaccatgcccggcctagagtcatcatggaaattaaacaacctgcttccaaatgacttttgggtaaagactgaaattaaggcagaaataaaaaaattatttgaaactaatgaaaacaaacatacaacatcccagaatctctgggacacagctagaacagtgctcagaggaagtttctagtgctatatggctacattaagaagctagaaagatctcaaatgaaccgcctaacatcacacctagaggaattagaaaaacaagagcaaatcaaccccaaagctagcagaagaaaaaaaaaaaaaacaaaatcagagctgagctgaatgaaattgagatgtaaaataccatacaaaagatcaatgaaacccaaagttgattttttaaaaaaattatttatttattatttattccataaattattggggtacaggtggtatgtggttacataagctctttagtggtgatttgtgattttggtgcacccatcacctgagcagtatacactaccccctatttgttgtcttttatccctcgccctcgccaactcgtccccctaagtccccaaagtccattgtatcattcttatgcctttgtgtcctcatagcttaggtcccacatatcagtgagaacatacgatgtttggttttccattcctgagttacttcacttagaataatactctccggtctcatccaggtcactgcaaatgctgttaattcatacaaagttgatatttttggaagcataaataacatggaaagaccactagctagattaataaagaaaaaaagacaagatccaaataaacacaatcagaaatgacagaggtgacattaccactgacccacagacatacaagaaaccctgagactattccacatgcctctatgcacaaaagctagaaaactagaagaaatagagaaattcctggaaacataaaacctctcaagattgaaccaggaagaaatggaaaccctgaacaaaccaacgatgagttccaaaattgagttagtcatacaagacctaccaaccagcgcaaaaaaccttagactagacggattcacagtcgaattctaccagatgtgtaaagaaaagccggcaccaatcctactgaaattattccacacaattgaggaggagcaactgctctctaactcattctatgaggtcagagtcattctgataccgaaacctggcagagacacaacgaaaaaaggaaaataggtaaagtaatacatatgttaatgatcttgatttagccattctacggtatatacatatttcaaaacaatatgtacatgataaatatgtacaatttgtcaattaaaaatatataaaaggaagaggaaaaaattcaaatggcgtagaatttgaaaggagaagatacagaacaaactccagtgtcttctttattcaactatatatacacacgttcaatggaccgggagcagtggctcaagcctgtaatcacagcactttgggaggtcaaggcgggcagatcacctgaggtcgggagttcgagaccagcctgaccaacagagagaaaccccaggtctactaaaaatacaaaattagccgggcatggtgacgcatgcctgtaatcccagctactcgggagggtgaggcaggagaatcgcttgaactcaagaggtggaggttgtggtgagccgagatggcaccattgcactccagcctgggcaacaagagcgaaactcagtctcaaaaaaaaaaaaaaaaaaaaaaaaaaggatttaatgaatgaatgatgagaccgttggtgacatctcccaccttctccctctcactccactgcagccacacggggctcctcactgttcccgtagcagcaggcatgtgcccccacagggcctctgtactggctgttcccactgcccgaacaccctcatgcaccatctgcactgtccaatacggccgcctctggccacacatggctactgagcagttgaacatggctggtccaaaccaagatttccaagacgtcgtgtggtaaaaaaaacaacataaagttttgcaaaaatgtttctattgattatgttaaaattatgatgttttaggtatattaggttaaatcagctattttatcaaaatgaatctcgcctgtttgtttttgctttttttttttttttttttttttttgagatggagtctcgctctgtcgcccaggctagagtacaatggcgtggtctcagctcactgcatcactgcaacctctacctcccaggttcaagcgattctcctacctcaccctcccaagtggctgggattacaggcgtgtgccaccacacccagctaatttttgtatttttgtagagacagggtttcaccacgttggccaggctggtctcgaactgctgacctcgtgatctacctgcctcggcctcccaaagtcctgggattacaggtgtgggccactgcgccggccatgtttctcgacttctgctggcaagcatgttccagtatttgcatggctcctagccctcatctccatttctctgcacagatgttatcttccccatgaggtctgccttatacatgaggcgtgtattataaagtgcaactgccaattcgccaaccccgttgtttcttctctccagaacactaggcaccatctgatctcctatgccttttccttattgtcagatactgaactctcagatacagttccccttcctccctccagggggcgccatggaacgcagggccctcactggccctggggactgggtgacgtcaggggtgagcctctggtgattggctccctcaccctgcgtaagatcaaagggcctaaaggtcagccccgacacccggagccattgtggctccggccggttgcgcgggccctcggaccctcagagaggcgagggttcgagggcacgagttcgaggccaacctggtccacatgggttgaaaaaaaaatttttttatcgttcccaatataacaacaaaacataaagggaggacgtcttgataggaagaaatgacatcttcctaagtgtttttaaattacttcaatgtatctttcttttttttttttttttgggagaccgaggcttgctctgttgcccaggctggagtgcagtggtgtgatcttggctcactgcaacctctgcctcgtcggttcaagggagtctcctatctcagcctcctgagtagctgggattacagtcgcctgccaagagatggggtttcgccatgttgaccaggctggtcttgaacacctggcctcaaatgatccactcgccttggtctcccaaagtgctaggatgacaggcgtgagccaccgcgcccagcctcttctattcttttagagacagggtctcactctgttgcccaggctggagtgcattgatgtgatgtgtgatcatagctcattgcagccctgaccatccgagctcaagcaatccttctgcctcagcctcctgagtagctggggccgcagatgtgcaccactgcacctggctaatttttaacattttttgtggagccagagtctgtataaaataaagtgtaaatagtaccataaataaagaatacatagtaccattttatagtagtataaaacggacattagaaactctggacttaaagtttaaaaaaatacacaaaagtagttctcaagttctagagacttggagaatccaggaatcaacaatgtcgtggaactcctacagcctttcataaagaatggccctcgaggaaagtggaattgtcagtgggcattgtgttcgtgcctcagctaaacacggcaggaatttatttataacctagtgtaacatcctcgaggcactgttcaattagtcaagcaattgtaaaattctcccagtcttagaaaagatacaggtgtgtgtccctctgctgtggctgtgcactgacgcttcagtaaaagttgccgtctaaaaccaccggcctgcccttgaattgttttgttttgttttgttttgttttgttttgttttgtttttttgattcgcagcctcactctatcacccaggctggagtgcagtgacacgatctctgttcactgcaacctccgcctcccgggttcaagcgattcccctgcctcagcctcctgaacagctgggattacaggcacccgtccccatgcccgggtaatttttgtatatttagtagagatggggtttcaccatg[136 bp omitted]ggctaagcctcaattttggggctcgcctgtgctgcatcagcttcacacctagagaagagagtgaaagagaagggagagccgtccttttgggctgccttgaaataaaggttgacccatgggttcatgtattgtcattcattctcattttctcttcctctctttctctctctcccctgccccttaagttagcttttctacaccctacctggataaggataagaaatagaaggaggggacactttaggatgctacaaaataaaatacaacaacaacaacaataacagcagcagcaacaacaacaacagcaacaaaaggggaagaaacaaatctggccactgcacattcctccttgccaacaaaaagccgcggatgcaaaaagctgcccttcactgcatagacagaacagggcgcgctcgagctatgaatctcggaaattactcaaaccatcagcctctgcaagaagcaaagtggacggccgggcgcggtggctcactcctggaatcccagcactttgggagcccgaggtgggcggatcacgaggtcaggagatcgagactgttctggctaagccagtgaaaccccctctctactaaaaaaataacaaaagcgaagtgcatctcccataaacgaggtactgcaggaagaaagcagaaaatgagacccgagtacacacatgcacgcgggcgtgcgcacacacacaccagaagaaatgaaccaagaggaaaggaaatattttcaagtaagcatttggagatgggaaaaacaccttgaaacagaaattcataaagtacacacatgttttttttttaagttaaaagaggaacaataataaacaggcagaaaatgaataaaaaataaaatgtcatatcagaagtgaagataaattaaaagtggtcaaaggagaagagatctaaatgcaaacttaagaaggggcaatttttttttttttttttttgagacgcagcctcactctgtcgcccgggctggagtgcagtggcgtgatcttggctcactgaaacctctgcctcctggattcaagcgattctcctgcctcagcctcccaagtggctgggattacaggcatgagccaccatgcccggcctagagtcatcatggaaattaaacaacctgcttccaaatgacttttgggtaaagactgaaattaaggcagaaataaaaaaattatttgaaactaatgaaaacaaacatacaacatcccagaatctctgggacacagctagaacagtgctcagaggaagtttctagtgctatatggctacattaagaagctagaaagatctcaaatgaaccgcctaacatcacacctagaggaattagaaaaacaagagcaaatcaaccccaaagctagcagaagaaaaaaaaaaaacaaaatcagagctgagctgaatgaaattgagatgtaaaataccatacaaaagatcaatgaaacccaaagttgattttttaaaaaaattatttatttattatttattccataaattattggggtacaggtggtatgtggttacataagctctttagtggtgatttgtgattttggtgcacccatcacctgagcagtatacactaccccctatttgttgtcttttatccctcgccctcgccaactcgtccccctaagtccccaaagtccattgtatcattcttatgcctttgtgtcctcatagcttaggccccacatatcagtgagaacatacgatgtttggttttccattcctgagttacttcacttagaataatactctccggtctcatccaggtcactgcaaatgctgttaattcatacaaagttgatatttttggaagcataaataacatggaaagaccactagctagattaataaagaaaaaaagacaagatccaaataaacacaatcagaaatgacagaggtgacattaccactgacccacagacatacaagaaaccctgagactattccacatgcctctatgcacaaaaactagaaaactagaagaaatagagaaattcctggaaacataaaacctctcaagattgaaccaggaagaaatggaaaccctgaacaaaccaacgatgagttccaaaattgagttagtcatacaagacctaccaaccagcgcaaaaaaccttagactagacggattcacagtcgaattctaccagatgtgtaaagaaaagccggcaccaatcctactgaaattattccacacaattgaggaggagcaactgctctctaactcattctatgaggtcagagtcattctgataccgaaacctggcagagacacaacgaaaaaaggaaaataggtaaagtaatacatatgttaatgatcttgatttagccattctacggtatatacatatttcaaaacaatatgtacatgataaatatgtacaatttgtcaattaaaaatatataaaaggaagaggaaaaaattcaaatggcgtagaatttgaaaggagaagatacagaacaaactccagtgtcttctttattcaactatatatacacacgttcaatggaccgggagcagtggctcaagcctgtaatcacagcactttgggaggtcaaggcgggcagatcacctgaggtcgggagttcgagaccagcctgaccaacagagagaaaccccagctctactaaaaatacaaaattagccgggcatggtgacgcatgcctgtaatcccagctactcgggagggtgaggcaggagaatcgcttgaactcaagaggtggaggttgtggtgagccgagatggcaccattgcactccagcctgggcaacaagagcgaaactcagtctcaaaaaaaaaaaaaaaaaaaaaaaaaggatttaatgaatgaatgatgagaccgttggtgacatctcccaccttctccctctcactccactgcagccacacggggctcctcactgttcccgtagcagcaggcatgtgcccccacagggcctctgtactggctgttcccactgcccgaacaccctcatgcaccatctgcactgtccaatacggccgcctctggccacacatggctactgagcagttgaacatggctggtccaaaccaagatttccaagacgtcgtgtggtaaaaaaaacaacataaaattttgcaaaaatgtttctattgattatgttaaaattatgatgttttaggtatattaggttaaatcagctattttatcaaaatgaatctcgcctgtttgtttttgctttttttttttttttttttttttgagatggagtctcgctctgtcgcccaggctagagtacaatggcgtggtctcagctcactgcatcactgcaacctctacctcccaggttcaagcgattctcctacctcaccctcccaagtggctgggattaaaggcgtgtgccaccacacccagctaatttttgtatttttgtagagacagggtttcaccatgttggccaggctggtctcaaactgctgacctcgtgatctacctgcctcggcctcccaaagtcctgggattacaggtgtgggccactgcgccggccatgtttctcgacttctgctggcaagcatgttccagtatttgcatggctcctagccctcatctccatttctctgcacagatgttatcttccccatgaggtctgccttatacatgaggcctgtattataaagtgcaactgccaattcgccaaccccgttgtttcttctctccagaacactaggcaccatctgatctcctatgccttttccttattgtcagatactgaactctcagatacagttccccttcctccctccagggggcgccatggaacgcagggccctcactggccctggggactgggtgacgtcaggggtgagcctctggtgattggctccctcaccctgcgtaagatcaaagggcctaaaggtcagccccgacacccggagctattgtggctccggccggttgcgcgggccctcggaccctcagagaggcgagggttcgagggctcgagttcgaggccaacctggtccacatgggttgaaaaaaaaattttttttatcgttcccaatataacaacaaaacataaagggaggacgccttgataggaagaaatgacatcttcctaagtgtttttaaattacttcaatgtatctttctttttttttttttttttgggagaccgaggcttgctctgttgcccaggctggagtgcagtggtgtgatcttggctcactgcaacctctgcctcgtcggttcaagggagtctcctatctcagcctcctgagtagctgggattacagtcgcctgccaagagatggggtttcgccatgttgaccaggctggtcttgaacacctggcctcaaatgatccactcgccttggtctcccaaactggtaggatgacaggcgtgagccaccgcgcccagcctcttctattcttttagagacagcgtctcactctgttgcccaggctggagtgcattgatgtgatgtgtgatcatagctcattgcagccctgaccatccgagctcaagcaatccttctgcctcagcctcctgagtagctggggccgcagatgtgcaccactgcacctggctaatttttaacattttttgtggagccagagtctgtataaaataaagtgtaaatagtaccataaataaagaatacatagtaccattttatagtagtataaaacggacattagaaactctggacttaaagtttaaaaaaatacacaaaagtagttctcaagttctagagacttggagaatccaggaatcaacaatgtcgtggaactcctacagcctttcataaagaatggccctcgaggaaagtggaattgtcagtgggcattgtgttcgtgcctcagctaaacacggcaggaatttatttataacctagtgtaacatcctcgaggcactgttcaattattcaagcaattgtaaaattctcccagtcttagaaaagatacatgtgtgtgtccctctgctgtggctgtgcactgacgcttcagtaaaagttgccgtctaaaaccaccggcctgcccttgaattgttttgttttgttttgttttgttttgttttgtttttttgattcgcagcctcactctatcacccaggctggagtgcagtgacacgatctctgttcactgcaacctccgcctcccgggttcaagcgattcccctgcctcagcctcctgaacagctgggattacaggcacccgtccccatgcccgggtaatttttgtatatttagtagagatggggtttcaccatg[136 bp omitted]ggctaagcctcaattttggggctcgcctgtgctgcatcagcttcacacctagagaagagagtgaaagagaagggagagccgtccttttgggctgccttgaaataaaggttgacccatgggttcatgtattgtcattcattctcattttctcttcctctctttctctctctcccctgccccttaagttagcttttctacaccctacctggataaggataagaaatagaaggaggggacactttaggatgctacaaaataaaatacaacaacaacaacaataacagcagcagcaacaacaacaacagcaacaaaaggggaagaaacaaatctggccactgcacattcctccttggcaacaaaaagccgtggatgcaaaaagctgcccttcactgcatagacagaacagggcgcgctcgagctatgaatctcggaaattactcaaaccatcagcctctgcaagaagcaaagtggacggccgggcgcggtggctcactcctggaatcccagcactttgggagcccgaggtgggcggatcacgaggtcaggagatcgagactgttctggctaaaccagtgaaaccccctctctactaaaaaaataacaaaagcgaagtgcatctcccataaacgaggtactgcaggaagaaagcagaaaatgatacccgagtacatacatgcacgcgggcgtgcgcacacacacaccagaagaaatgaaccaagaggaaaggaaatattttcaagtaagcatttggagatgggaaaaacaccttgaaacagaaattcataaagtacacacatgttttttttttaagttaaaagaggaaccataataaacaggcagaaaatgaataaaaaataaaatgtcatatcagaagtgaagataaattaaaagtggtcaaaggagaagagatctaaatgcaaacttaagaaggggcaattttttttttttttttgagacgcagcctcactctgtcgcccgtgctggagtgcagtggcgtgatcttggctcactgaaacctctgcctcctggattcaagcgattctcctgcctcagcctcccaagtggctgggattacaggcatgagccaccatgcccggcctagagtcatcatggaaattaaacaacctacttccaaatgacttttgggtaaagactgaaattaaggcagaaataaaaaaattatttgaaactaatgaaaacaaacatacaacatcccagaatctctgggacacagctagaacagtgctcagaggaagtttctagtgctatatggctacattaagaagctagaaagatctcaaatgaaccgcctaacatcacacctagaggaattagaaaaacaagagcaaatcaaccccaaagctagcagaagaaaaaaaaaaaacaaaatcagagctgagctgaatgaaattgagatgtaaaataccatacaaaagatcaatgaaacccaaagttgattttttaaaaaaattatttatttattatttattccataaattattggggtacaggtggtatgtggttacataagctctttagtggtgatttgtgattttggtgcacccatcacctgagcagtatacactaccccctatttgttgtcttttatccctcgccctcgccaactcgtccccctaagtccccaaagtccattgcatcattcttacgcctttgtgtcctcatagcttaggtcccacatatcagtgagaatatacgatgtttggttttccattcctgagttacttcacttagaataatactctccggtctcatccaggtcactgcaaatgctgttaattcatacaaagttgatatttttggaagcataaataacacggaaagaccactagctagattaataaagaaaaaaagacaagatccaaacaaacacaatcagaaatgacaaaggtgacattaccactgacccacagacatacaagaaaccctgagactatttcgcatgcctctatgcacacaaactagaaaactagaagaaatagataaattcctggaaacataaaacctctcaagattgaaccaggaagaaatggaaaccctgaacaaaccaacgatgagttccaaaattgagttagtcatacaaaacctaccaaccagcacaaaaaaccttagactagacggattcacagtcgaatcctaccagatgtgtaaagaaaagccggcaccaatcctactgaaattattccacacaattgaggaagagcaactgctctctaactcattttatgaggtcagagtcattctgataccgaaacctggcagagacacaacgaaaaaagaaaaataggtaaagtaatacatatgttaatgatcttgatttagccattctacggtatatacatatttcaaaacaatatgtacctgataaatatgtacaatttgtcaattaaaaatatataaaaggaataggaaaaaattcaaatggcgcagaatttgaaaggagaagatacagaacaaactccagtgtcttctttattcaactaactgaagcacttatttaaataattaacttgtttaatttattttaattaagttaattatttaaattatttaaacaagtgttgaattgctttagtttctgctaattgttctaaataaacagacatagaatacaaaaatcacaaaatgtcagaataaaatttcttttcacaaacatacaacaaaaacttagcaataattaatgtagtaacatagactggtttggtgtcttacatgtgtgaagaacttgtgaacagaatttgattcctcagttgaatattggttctagaatttgaggatcattattcattctgagcaatcaaagtttaacctaaaattaaacagaaaaatatttaacttaaagctagtcccagaatagcacagctaacatcacactgaactgtgaaaccttttcctctaagatcaggaagaagacaaggatgtccacttttgccactactgtttaacagaatagtggaagcccttgccagagcaattaggcaagaaaaaatagtaagaggcaaccaaactggaaaggaagaaataaattatctctgttcacagaaaacatgatcttgtgtataggaaactctaaagattctacatacaaaatgtgttagaactaatacatgaattcagcaaagttgcaggatatgaaatcaactcataaaaatcagttgcatttatatactaacaacgaagaatccaaaaaagaaacaattccatttataataacaccaaaacctcccaaagcttaggaataaatttaaccaaggaggtaaaagacttgaagttaaataagatataaataaattaaaagacattccgtgttcatggactggaagatttaatactattaagatgtcagtatggacccaaagcaatctaccaattcaatgcaattcctacaaaagttataaaggttctttgctttgttttgttttcgcagaaatagacaaatctatcctaaaattcatacggaatctcaagagactcagaatagccaaaacaggctgggcatggtggctcataccatgtaatcccagcactttgggaggctgaggcaggcagatcacctgaggtcaggagttcaaaatcagtctagccaacacggtgaaaccctgtctctaccaaaaatacaaaaattagccaggcatggtggcacatgcttgtagtcccagctacttgggaggctgaggcaggataattgcttgaatccaggagacagaggttgcagtgagctgagatggcgccactgcactccagcctgggtgacagagtaagactttgtctaaaacaaacaaaaaaatgaataggcaaaacaatcttgaaaaataagaacaaagttggaggcttcacatttcctaatttcaaaacttaatacaaaaccacagtaattaaaacagtgcggcgctggcataaagacagccacatagaccaatggaatagaatacattgaaattttctaaaggacaattttttcaatttccaacttttatgtggtttaacattcgtaagcaagtttgtgttctttgaatcactgagagcttttgagcatgtagcaatatcctgcacaaattttgcatgagtgtgttaaagacgggtaagtattaaatgtctcatgcagccggatgcagtgactcacacctataaccccagcactttgggaggccaaggcaggtggatgagttgaggtcaggagttcgagaccagcctggccaacatggtgaaaccccgtctctgttaagaatacaaaaattagctggatgtggtggtgggggcctgtaatcccaggtacttgggagtctgaggcaggggaatcacttgaatccgggaggcagaggttgcagtgagccgagattgcaccaccgcactccagcttgggtgacagagcaagactccgactcaaaaaaaaaaaaaaaaggtctcatggaggaagtcagttctgtagaatgaccccactgcaagatgctcttccagtgccaggaagtggattatgttctaggagccatgaaggagagtttacagaagcccattctccgcttcatcatcattgtaacacaatgaaagctgatgacatggctgcttggctacactgtgtttatcagcttctcctgcatttagaatgggggcatgtaactacacactctaagtaggtgcttacccaggtccagagtctccaggaataagatcaatgtagaagagcagctacagaaggagtcggttgacttgaatgacataaaaataaatcatggtaattgcttaagcctcagcattttttttgtactgtcccatttagataaatgaatagagtttgacaacagtctttcatgtctttgttggtgccaccaagctctgaaattcccaaggaacataatgtttcttcacgcgctccattctcgtaggaggctaactacgatgacgtgcaatgtgacttttccctatcttaatagctgggcccaagggtctgggaaccgatgtgagtcatacgcctttctgaaaatatttttttcaaactgtattactcctgggccctgcggaaatcattgcagaaagtatttggtatcacactgagctaacagagaagtgaacctaactcaggactctgtctcatgttcctataatcttccactctaatcactggatatcagtggtattcctagtccttgaaaactaatctttgctcaaaaccagtattcagtaggctctggaaagtttatgtatttacctttgtaatttctttctttctttctttctttctttctttctttctttctttctttctttcttttttctttctttctttcttttttctttctttctttctttctttcttttttttctgagagactagagtttcgctctagtctctcacgctggagtgcaatggcgcgatctcagttcactgcaacctccgcctcccaggctcaagcgattctcctgcctcagcctcccgagtagctgggattacaggaatgcgccaccatgctcagctaatttttgtatttttagtagagatggggtttca[143 bp omitted]agtgcctggttacccagccttgccttcactcaaggggcattgagttggtgaactgtcttgtgcctggaactgggagaaaagccatgactctagcgcg[132 bp omitted]ccgccccctcccgggttcaagcaattcccctgcctcagcctcccaagttgctggggctacaggtgtgtgccaccatgccaggctaattttttgtattttagtagagacggg[136 bp omitted]tgaattcatttctgaaaaaaacctatgattatcaccaccagatgtcgctcttgcaccagccattctctatgatctgattagtaattataccctgttgcctggtatcactttgcttcttagggattaattgccaccacctgggctcaatcacaccaggctctgcctgtctccactggaaccctgaagctcacttcaaaaagcatggctttctgctagcattcctagagcggaaaagcaagtcagccatattctttacaaaagatttcctatgctttgtgaaagattaagatgagatttatgggttcacaaagacaatgtttccgtttttttaaccataatctatagaaagaatagactttaaaatatgagctgacttctatctatccatcatctatatctttctatttaggcatccctatctatctatacaatctctaaacctttttagaaataactcatgccatacacatgaaacactctgtgtttttccatccacgtttgcagtatttttaatttaaacaatgctggttgtgctttgataaatggaagattatgactcaccatttgaaaagagctggcctaagtgtgtgtctttcttttcttttcttttcttttcttttcttttcttttcttttcttttcttttcttttcttttctttctttttttgatggagtctcactctgtcgcccaggctggagtgcagtgttgctatctcggctcgctgcagcctcagcctcccggattcaagcgatcctcctgcctcagcctcctgagtagctgggattacaggcgcctgccaccacacctggctaatttttgtattgttagtagagatggggtttcaccatgctggccgggctggtctcaaactcctgacctcaggtgatccacccgccttggcctcccagtgttgggattacaggcttggaccaccgtgcctggccctaagtgttttctaacataagcatggataggtttaagagtggagggtgggcgtttgtgtgtgtgtgtgtgtgtgtgtgtgtgtgtttgtgtgtgtgtgtgtgtgtggtcacagggcctctggacattgccatcccccttcacctctgcacctgcctaattgtcattaaactatcgggacccagcctggttgttgtcccttgtcccttcctagaagtgatccctgatcctgcaggctgagcaagggtcccgttctctggcctcctcttacccctggagtctctggtttttttttttttaaattagttaattaattaatgtatttttgagacggagtttcactctgtctcccaggctggagtgcagtggtgcaatctcagctcactgcaacctccacctcccgggttcaagtgattctcctgcctcagcctcctgagtagctgggattacaggcaggcaccaccacacccagctaatttttgtatttttagtagagacagggtttcgccatgttggccaggctggtctcgaactgctgacctcaggcgatccacctgcctcagcttcccaaagtgctgggattacaggcattagctgctgtgcccaggcatatactcactgttttcttggccattcatgaacacgtgaacagcagggaagaactggagttgttcaatgccctcatgccctgctgaggttgaacaaggtgatgctccaccttcttgtttcggctttcagtgtatacaagggtccttcaggctgggcgtggtggttcacaactgtgatcccagcactttgggatgccgacacgggcggatcacctgaggtcgggagttcgagaccagcctgaccaacatggggaaacctcgtctctactaaaaaatacaaaattagctgagtgtagtggtgcatgcctgtagtcccagctatttggaaggctgaggcagcagaattgcttgaacccgggaggcggaggttgcagtgagctgatatctcgccattgcactccagcctgggcaacaagagtgaaactctgtctcaaaaccaaccaaccaaccaaccaacaaacaaaacacacacacacacacacaaacaaaacaaaaaataaacaagtgtccttgtgatctatttagtctcatgtttttcccatttttgtattttttcttggcgatgtcactgtttaaatgactcccaagtgtagtcctaaaagcaaggggttatggcgcaccttatggagaaaatatgtgtattagagaagcttcattcagacctgcattcagccctgttggtcttgagttcagtgctaatgaatcgacattatgtattaaatgaaacatctttaaacagaaacacatataaaagaaggttatgtattagtcagttaacaaaaacattgtgaccagaggctctcaagaaactaaccttctatttcccctaaaagcaccagctcggtattcactaattcagtgtacatggctactttctagaacacatttaccacatacagcaagaattgactgcatcagcttattttagattcacaaagacctatgagacttctatctccactttacagatgaggaaactgagtcttaagagagatcaagaaacttgcccttcatcaatgatgcagcctggatagcaa[142 bp omitted]ccatctttactgaaaatacaaaaattagctgggcgtggtggcatgtgcctatagtcctagctacttgggaggctgaggcagaacaatcgcttgaacccaggaggcggaggttgcagtgagccgagatcacgccacagcactctagcctgggctacagaatgagactctgtcaaaaaacaaaaacaaaaaacaaaacaaaataaacaaaaaaacttaaggaagctcacaaagctcataggtgtttagaaaataaacgtcctctgccacgttaaaaaaaaaaaaaaaaggtatactggcagctggagtaggagacaacctgcaggggaagtacctgagcatactgttctcttcttgggatgtacgaatggggtcgatcaaggggactcgagctggggtacacactgaggtcaccaggggagctttatttagaaggtgtgatgcctgggcgccaccctaggactttctgaatgaattgatatgggcagcatactggccatggagactttttaaagttctaccgttgaatgtaaactagatcaaagttcagaagcactggggccaggcacggtggctcatgcctataatcccagcactttgggaggctgaggcgggcagatcacttgaggtcaggagttcgagaccagcctggccaacatagtgaaaccctgtgtctactaaaaatacaaaaaaattagcctggcacggtggtgcacccctgtaatcccagctactcgggatgctgaggtgggaggactgcttgaacttgggagttagaggctgcagtgacccgagatcatgccactgcgctccagcctgggtgatagagtgagactccatctcaaaagaaaaaaaaagaaaaaaaaaaaagcactgggataagcctagggctcaagagaccaggcatttcatttctttctttctttttttgactcgatggatgtttaatgatttaaaatttaatttaacttaattttagattcaggggatacgtgtgcaggtttgtgacatagatatattgcatgatgctgagatttgggcttcaatggatgccgtcacccaaatagtgaacatagcaccccacaggtaatttttcaaccctttcctcgcaccttccccccgcttttggggtcccctgtgtctattgttcccatcttttatgttcatgaggtttgtttagcaacctcttataagtgaaaacacgcagtatttggttttctgtttctgcattaattcacttagatggcctccagctgcaattatgttgctgcaaaggatacgatttcattctttgttataggagactggccatttctagtaagctgcatgctgctgtcttctttctcctttgtcttctgtattagtttgctggggctgccataaaaaagtaacacagatggggtggcttaaacgacagagatttattttctcactgttctggagggtagaagtacaggatcaaggtgacatcaaggttggtttcctcaaagcgtctctccttgccttgcagatggccacccccttagtcctcacaagggctcccctctgtgcacacacatccctggcatctctctgtctgtccaaattttctcttcttataaggacaccagtcatattggattagtgcctactctgaatacctcatcttagcttaattgcctctctaaacaccctttctccaaaaacagttgcattccgaggtcctgggggttggggcttcaacatatgaattttggaaaggacacagttcagcccataacaacatctctagccaattctgaggtattgtttgaacattacagcctacttccatctgtgttgcttggaaatagaagttatatgtcaacccatagaaaggatattgaaggggaagtcattgattcctgtggccaccatgttggtaggaaccacagtgaatgtgaggtgcccgaaggaagatgcatcttagtggatggatgcctggactctgatgtccactcatcactctccctgcaaagatttcccttttgctagaaatgctggagaaaaagagttttattttattaagaaaattgggggttactgtatatcagaccattctgacctgctgaagaatccatggctttcaggaagaagattattactgctggatgcatcgatcatgttttgtctgtatctgatagccagcagatgcaagcaaacctaacccaaagaacagaagcagaaatcagaaagcagacacagattgccccaacatttcctgctcattctctgccaggtactaaaacatctgatctggagtctgtggagacacacatcttttctgcatataaaatcagtctctctctcttttttcttttttttttttttttgagacagagtatctgtctcccacactggaatgtagtgctgcaatctcagctcattgcaacctctgcttcccgcgttcaaatgattctcctgcctcagcctcctgtgtagctggaactgcaggcacgttccaccatgcccagctaatttttgtggcctcagctacttaggaggctgaggtgggaggatgacttgagcttaggagtttgaggctgcagtgagctatgatggcaccactgcactgcagtggcatgatcataactcactgcactccagcctgagtgacagagcaagaccctgtcttaaaaaaaaaaaaaaaaaaaaaagaaatcactgatggaccaggcacagtggctcatgcctataatcccagcactttgggaggctgaggtgggcggattgtctgagctcaggagctcatgaccaacctgggcaacactgtgaaaccccgtctctactaaaatacaaaaaattagttgggcatggtggcgtgcacctgtagtcccagctactcaagaggctgaggcaggagaattgcttgaacatgggaggcggaggttgcagtgagccgagatcacaccattgcactccagcctgggcgacagagcgagaccctatctcagattaaaaaaaaaaaaaaaaaaagaaatcactgacggctgcctggagggtggattttaggaggatgtgagtggtaacagtaaaagtagcctggagactattgttgttggggctggtgctggtgacaccagtgcacctgcagacaagtagatggatttggcacgttttttgaagacagtcttggtaaaacttgtaaattagttggacgtggtagacatgggaaagagaagagtaaaaacagactcttaggtttggggctgggcaaatgggtggatggtcatgagatgggaagattatcagagttcctggcctggggatatgaagcagaattgagattctattttgttttgcatgattattcaacatccaagtaaacagatcctttatccagtttgatatatgcttttggggtttaggagataactcaggactggaaatagaaatttgtgtgtcaatgatgtatgggggatattcaagtcatgaggctttataagattcctgtgtcattcaggattcagtcaggagacagaaacgacacctgtaattcaaatggagaaaaatgtaatataaggatatattataaatggtgaaagggtattaactagaagggataaagagaatcttaagaaccctaaggaacagcagattgtaggaagaagccactacctgtaaggcagggagagggggagagagagagagagagagagagagagagagagagagagagactttagaatgtatgtgtgtgtgtgagagagagagactttagaatttatttgtgtgtgtgtgtgagagagacttcagaatttatttgtgtgtgtgtgagagagagactttagaatttatgtttgtgtaagagacagagagagactttagaatttatttttgtgtgtgtgagagagagactttagaatttatgtttgtgagagagagactttagaatttatgtttctgagagagacttttagaatttatgtttgtgagagagagactttagaatttatgtttgtgtgtgtgtgagagagagagagagactttagaatttatttttgttttattttatttttattttatttttgagatggagtctcactctgtcactcaggctggagtgcagtggcacgatcttggctcactgcaacctccgcctcctgggttcaagtggttctcctacctcagcctctggagtagctgagatcacaagtgcgcactaacacacccagctaattttcgtatttttagtagagactgggcttcaccatgttgtccaggctggtctcaaactcctgacctcaagtgatccacctacgtcagcctcccgaagtgctgggatcacaggcatgaacgactgcgcctggtcaactttagaatttatgagaccagtgtcttattcttctctttttcagatatgtgggttggttgttgttatcctatttctgtcccaacattgtatcatgatatgttggggaaaaggactaaaatgtgtatttttagttcagaagtctccaaataaggatagtacaaaggttgacttgatgcggatcgcaagatcctaatgctgtgtcccgatgagatttgggcactcttgggatgttggctagattgacttgcatgtggaataaacatgaataatagtgatgaacaggtgggctgtgattattttggttattgtttaccaaatacccttctcctcttcctaccatgagcagaatttacttccctgtcctattaatagtggacctgttcatgtgccgtgatgtggcaatgggatgttagcaggatggatacaagcggtcattttaaatgtgtttcttcagtctttgtgcttctgcctttagtcatgagaagaggatggctcaggtagtcgctccttatgggaggatgaaaaatctgcatctcagagccgaactaagcctaaatcagacaaatcctagctgacccatgaatgcatggttacaaaaataatgcttattattttgagggtggtttgttatgcagcagcattgtgaatagctaactgatacagggagaaaaatatggtggtggcaccaatggattcagcagtggcaacttcctgacttctgaaccacagccatggtgttgggatctctaaagcattatcactgggaccgtccctgctttggctcttcctacctttccagcgattttgtgagccactaattctctgtattttatcgtttaattaattaattaattatttttgagatggggtcttgctctatcttccaggctggagtgcagtggcatgatctctcggctcactgcaacttccgccttttgggttcgagcgattctcctgcctcagcctccggagtagctgggattacaggcgcatgccaccaagcccagctagttttcgtatttttagtagagatggggtttcaccatgttggccaggctggtctcgaatttctgacctcaggtgatctgcccgcctcggcctcccaaagtgctgggatgacaggcgtgaggcaccgcacccagcctgtattctgtcttttaaaataaagagattttattgtctgcacagactcatcaaaggtcttctttgaccgaatccctctcattttttatagtatagccatatttctcttgttctagtcctcaatatgccacacctgttcctgcattaggaactttgacttgatgttctcactgtccccagataacctttcactggatcttcacatagctggcctaccaatctgaaacagactgtctgtcacttaatattttattgccctaatttttagcatagcatccattcatactaaattccttctttattaattgagagcactcctaagaacacgcgtcttgttttattgtgcaagaaggagatttataataacattaatatctgttaccaatgtgtcttgttcattgtcaaagccttggaaatataatttgaataaaaaggttttggaatactgaaaagtctttagaaatttttgttctgtcctatgttcatagtctttgaagaaaaagttattctgactgtttttcatacttgttcatctgcttcgctggttgtaattgatgtctctgcattcctaaacaagataaatacctggggtttgctctattaaatcggaagataattggcactttcctcgtcttcaacatgtgtaaacggtgagtggaatctaaaatctgctagatttcacaatttaacaagggagtggtgttgaaagtcttacctcattgaggttggcagactgaatgcttgattccagttgtcccatgctaaccttgatattcttttttttttttttttttaacttttaggttcaggatacatgtgcaggtttattatacaggtaaattgtgtgtcacagggctttggcgcacatattatttcatcaccaacataataaacatagtgctttataggtaatttttgtatcatctccctcctcccactctccaccatccagtgggccctggtgtctgttgtccttttcttttctccatgtgttctcaatgctcagctcccacttataagtgacagcatgcagtatttggtattctgttcctgcattagtttgcttataaccttgatatagttacgtgaaccaaatatcttactgtattctttaaggtagttatatagagctggattttaaatagaaattggaaatagaaaattcttcacaatggttacctcggatgtgtggaattagaatattgaagctgaggtggagagagtgtttattttaatatattaaaatagcatagtatttctttttaatgtaatttttaaaaaattaaaaaattcccagttttatttccttcctatatatgcgtgtgtgtgtgtgtgtatacccacacacacatccccacccccacccccacacgtacgtaattgagagca[187 bp omitted]gtggcgggcgcctgtagtcccagcttctcgggaggctgaggcaggagaatggtgtgaacctgggaggcggagcttgcagtgagccgagatcgcgccactgcactccagcctgggtgtcagagcgagactccgtctcaaaataataataataataataataataataataataataataataatgtaggcagtaacatgccagagacagtagtttttacatgattctgtgtttttcataaaagatttggaatattttactcacttctagggaacagtctcctgtcattttattggtaccatctcatcaatcaccagcacgctcaattaattcattttaggacaactcatccatctctgtggtccttccacctccatggggatccatatgtgtgcacacaaacacatacacttttcattcataacgacaataaaaagtacagctcccattttattctgcaaatattttgaggttaagagaaaggggaagctggttgaaattctggttcaacatttgagagttgctggttgctacaacagttggttgttgagagattggacccttcctttcagccagaaaagaaagataatgtttgcctggatattattgggtattacaagagaaataagcaagccaagtacacgcggggagggcgccatcttgttcttgttcccgccactgctctgacgcagcaagaagaagtcaaaatcagttggagcttccaatctactgagcctctacctgcttctcctttcattcactgccatcttttctttgctgtttgttcacttctggctccacgtttatccttatgatctttcttttgcacatactctatccttagcactctgttcttctcccacacccaccaaacacccacttggaaataaacccaaacatcgcccttctcagtgtgatcccatgagcaggtatagctgtggtgaaatctcataatttagtttggtgggattacaaactcatgttccccagccatgctgagtgctatctgcatgcacctcccggctctctctccacccctcattctgctctgagctcctttccctttgctttctacttgggcttgaccaatgggatgcactggcaggagattaaagggaagaaggttgaggtattaattcccttggctcccatggattggtcacttccacagccactttctctctctctctcttttttttttttttttttgagatggagtcttgctctgtcacccaggctggagtgcaatggcacgatctcggctcaatgcaacctccacctcccgggttcaagcgattctcctgcctcagcctcccaagtagctgggattataggtgccggccaccacgcctggctaactgttgtatttttagtagagacagggtttcgccgtgttg[133 bp omitted]cattctctcctattctgtctctcgcttgctctccatctctgtcctttttcttcctcccttgctctcccacgctctcaattccaggaatttctcttcccctcactgtttaggtattgctcttactatccctgaatactgcactattatctatagtttccagtttcctctaactacccaatttgagcgtgcagtaagcttcctgactgacgcattaacctcaaccaaaccccctacactagccagacgtcttccaacatttctctggtcacctcactctccactctcttcaatgaccatgacacacctaccccactatacccatccctctcattgtcacaagattacttttcctactactttcctgataaaatacaattaaaaaaaactctctcacatatgaatcccctcaaatctacaaatctgcttatatccacatgcacttacattttcttatacctcgtaacaatggaagaccagtttctaccgaaggtgactccactccctcctcctgggatcatcccatctcttccttttttctctgggccttctatcagatatttcctctctactattctttgttatttcctttcatgtttttttccttttgagatgaggtcttgctatgttgcccaggctagtctcgaactccagggctcaagcaatccttctgcctctgcctcccaaagtgctgggattacaggcgtcagccaccgctcctggcctctataatcaaattggattgtatccagattctgcttaccgaacgatgctctgtggcttctctttggacttagccagctctcaagtgctggcttgcccactgcctggctcccagggcactcaccatggaccagccccagtggctttccctcactttgtacagcgcacccatctttgttgcccttgttcgtgtggttcatatctgaccctttttaaacctcactctggtactttatctccacacctgtattcctacctcaggtatcacctcagttatcactttttttctgttttagaaatattctttattaaggtaatgcattttttttttttttttttttttttgagacggagtctcgctctgacacccaggctggagtgcagtggtgcgatctcggctcactgcaagctccgcctcccgtgttcacgccattctcctgcctcagcctcctgagtagctgggactacaggcacccgccaccacgcccggct[175 bp omitted]tttaagtcacagaaaaattgagtagtaggtataaaaatttccatgtacacatagccactgtgttatcaatatcctccaccagagtggaacatttgttgcaattgatgaatctacattgacacatcactatcacccaaaatccataagcttattttacttcatttattttattttagaggtgggtctctctttcatcacaactcaatgcaaccttgaactcttgaactcaggtgattctcctgcctcagcttcccgagtagctgagactacaagtgtgtgccaccatgcctagttacatttttaaattttttcttttgtagaaacggggtcttgctatgttggtccaggctggtcttgaactcctggcctcaagcagtccttcctttttggcctcccaaagcgctgggattatgggcataagccaccacgcctaccccatagacttaatttttaaaagggactaattttacacagttagcaattaaagtgctgaggctaaactacagatttccatattaaaaccccataatcctgaatcgaaaacctctagttatttatagttagatcaccttcaactcacatcccagaaaaaaaaaaaaaacaaaaaaaaaccctctctaatgagaaagggttctcctctgccaacaaaaactctaggttctttccaaggagaatgattaaacgtcttcatccccctcccctggtaaatctcaccatcattcacagtatttccaaattcggtccttgttaaaattcttggtcagtgaacaccattttttcccaaatgcttccccatcatcagtacactcccagtagatcaagcgtctgtaccagaagggaaatacacagtttgcaaaatctgcagaggaggaagaggaagaagcagagtaagaaacctttctaatttgcacccacctccaccacaccatgcacacacatgcacacatatgcacacatgtgcatgcacgtgaacaaatgtgcacacatacacatgcacactcacacagacatacatgtatgcacactggtgcgctcacacacacacgcgcaaatacacacttttgcttcctattcagtatcatctgctctgccctatttcaccaaaggcacatgggaacaatattggtgggggattcagatcccacatcactttgctgttctattaaaaagattcttttcaaaataatgtggttgaaatgctcataacatatctatggtgcaatgtgatttttatatcgtcagaaatcgaacatcctttattttcacaacttaattggctatggattctattttcagaaccctcttgtgttttgcctcagatcccagcctcagagaccaagattactgctctgaggtatttagagacaggacactcaccttctgcactgcaaaacttccagtatccttcgtaggtcttgtttaacgagcaccacttgtgtcttgccttggacttgatgcagtcataatatgttccatttttatagtggaatggaaagacacactccccatctagagaaaacaaaattcttcctctgtttctgggtgtgttaggagagaggttatcaagcgactgtcttcctaggcgctgttgccctttgaaatcagagtcattggctgtggctgtagtaaatgttattgtgctactcaatagcagagctttggctctctaatgacaaagctcttttgttttatattcctgcccctgccctacttcttttccaggttataaacagtctcaaaattttgcttagcatttgccccagtttcagaaatctctcctaagcgtagaaatataaatgtgggcatttatctacccaacaattcttcccccctgcccctggatctcttatttttacctctttccgtcatctctctttctctccctctcccatgcaactatacatgtgtgtatgtgtgtcacctgggtatatctgtgttgtatggttttatatatatacttatatatgttatatggttttgtatatatgctgtatggttaatacaggatatatatatatatatatatatatatatagttataggtgcatacacacatacaggcacacatacataattttttgctacccttcaaaatgaatcatattttatacttgagtttccgacttaacacatcacagaaatcttcttaaagtgattgtgtagccctaacttcttcatggttcactgcagccttatcctcctgggctcaagcaatcctcccacctcaacctctggagtagctgggactgcaggtgcgtgctaccatgcccagttaatttttaaattttttgtagagatgagatctcactatgttggccagggtggtctcaaactcctgagctcaagcatcttcctgcctcggcttccaaaaatgctgggattacagtcatgagccactgagtccggccttaacttctttctaatgctgattcatgttctgtgatatggattcaacacaatttattcagtatttccacattcagatttttcctactgtaaatacagctgtagtaaacatttcacatatttaagtccttatgtattgaagcatttgtttctatagaatccccaaagcaaggttgcaaggacacaatgtatatacaattttaacattgatgaatattgctttgtcaaaggaaaatggcaattagtctttcccaccaattgtgctcctttacctgaattttcattagcacgaagcatttacacactttaaaaatgtttacctgtattacagaagatttctgccttgctttaaaagatctactggtctttaggccatacatatattttccattttcttcttaaattaaacaattttgttccttttacatttaaaatttgattaagctagaatttagttttgtatatgatgccaaagggcaatgcaactttattttctttcaaacatatttagtaatgacagatcgatgatgaaataaatcacctgtacatttaaacaatcatgtttaaaaccatggattattctaatatatcctgggatccattctatattttctataaagtttcttgaaattattagagaggtaaggaagcatggtggtaaaatgagcaggctctggagccagcaagcatcacaaaatatttcttcttttcttctctcctcttccttctcctcctccttcttcttcttcctcttcttcttccttcctccctcctcctcctcctcttccatttttctaggctgattccatgttgcttatattacaatattttagtatgtctacatatctgatgagacaaaatatttctctactacagcactttgttcatacttctaattattattggatgtttttctatataaattttaaaatctattatttcctgttagattggcagaaattaaagagtagacacatttagtgctgatgaaagttcagagtgacttctatacctctgttttctttatctgtttatgaggcacttatgttacattttatataaggagaaaaaatgattttttttactggaaaaacattactgatttcctcacttttacaaaattaaaagaaaatatacattaataatcaaagttttctgatcgacttacctgtaacttctggaaaatgagttatagtttctgaaaaataaaatttagagctgacatttatttcactattattaggctttaaaatgggctcttacgtaaaataaaattaaataaaaatgttagtttaggaaaaagtgatattgttatggcattatgttttccatccaagaacatggcatctgctctttttcaaaatgtatttttttgctcttcaatatgattttcttatttattctatataaatcctacacatttctcacaaatttaattccaaagtgcttttttttggtcactgatgttaaacagaatgttttccatttccatcaatgtccagttggttcttatcagtatagagaaaaactattgactgttgtatgtttatcttgcatccagccacatagccatattactttattaaaactaataatttttattcatgttcttagggatttaaggtatacaatcataaaataattttgcctgttattttatatagagtttgtcctttctacaatatcacttatgttagaacctaaaatagtgttaatgtaacacccctgtgctttcctagttttaattggtatgacacttagattaagaatgtttatttcagcatgattagtattagattaaaaataataattaaaaaatattcatccctgagggaattttaaaatgaaattggctttataatatcaagtaggcattaataaagatgagtatataaatagatacggaaaaatttgtacttcatttttaggtggcaaaaggcattttctatttccttcttttccagaatacttgatttttgctaaaaatcacattatgaagttacatgtaatgacatgtttaatcacccaaaagtaaaattaacagtaaaattatgatttatctcctcttcttctttctttttttttttttttttttttgagactgtcacccaggctggagtgcagtggcgtgatctcggctcactgcaagctccgcctcctaggttcacgccattctcttgcctcagcctcgggagtagctgggactacaggcgcccgccacca[138 bp omitted]atttttaacatgaaatttactttatatataagtacataaaatagtaatctttaatgaaaagtatgatttcttaccaggaaagggaatactcaatggtttcacattttattgcaaaaatttgaaaagaaacgctaataaaagttttttgatcaactcacccacagttgatgataattcatctgaaaaacacaattttgaacaaatatttatgtcactttaaaataaaagagatgaaaggatttcaccaatttctattctagtaagaataatactattttgaaagttagacatcaaagttcaatagagcttatttttagtagtgtgattgtgggtgatttcttactttccttttgctttaattgtatttttcaaatattattaaaggataggaatgattaaaattatttttaaaacaaaaaattcagcaggcaaaggaaatgatttacttttctcacatttttctataaaataaaccacttcatcataggtttctgatatgaacactataggtttttatttctgtcaccacttctcactgaatacctgaattctactattagagattcatgtctttggagttgccactttcaaaatggaaacctcttcctctaggagggaaaaataagaatgatacctctgaggtatgtaggaaatgcaaataaatgctctgaacgtcttctctatcctgggcactatattttatttaacttatcagaacaattttgtgaggcaggcattgtttccatcatcttagagataaagttcagaaatgttaggttccattaaattaaaaaagttaagcatatggcaattcaatttgaatccccccggaggggttggttcagtaggaagtaacggcccaaaccctggcacaggctcaaccacttaccaaccatctgccctcagtttactctgctgtaaaatggagagagaacattaggatgtcaagtcctccccagtttgaatatcctaatattcttggaatgaaggaaactgcctgatagctttactttttttttttcttaaagcagcatttttcaaccattgttccttcatgagccattcaacctgtaatatttacctccccctccttagaacttgaattttttgttttgttactttgcatggttcctgatgaagtgattttaggcaaaggctatttgatttaaaaccagcatgttttagttaaatattacataactgttacaaagttcatttaattgaggctttaagaacagtcataactttaggatgaaatacaacatagaatgaattgtagaataaatatagagtgaaaaatttgattttttcccaaatagcccgtaatagatgatgcttaataaccattaagatgatgtcagatagaaaagcacaatttaccaacaagtaaatttacaaatgtcatgtttggttaagagaacatccacgtattataatgtaattagcagatatctctcatattaaagcattataactcgacatattctgtgttcataactagttcatcaaatttgtggattacacttgaaagagcaatgacttaattttttattttttgaaaagatttttgcaaaagcaatgattttaattctgaatttgttgtgtatatttcatttattactgacgattttgctatttgctcgtgtttattcattccacaagtttgtttttcagctaaattgtcctggctgccattgtggcttgaaattaaaacgtttttccttaggcacatcttatttaagaaatagtcataatggaccagcacaatggttcacaagctttgttgcatattagaatcaccagctgagtttttaaaaacccagatcccttccacttctgggtatatatacaaaataattgaaagcagagactcaaacaaatatttgtaaacccatgttcatggtagcattattcataatagccaaaaggtggaaagaacccacatgtccgtgagcaaatgagtaaataaagaaaatatggtagacacatacaatggagtattattcagcattaaaaaggaacaaaatttgaatagatgccaccacatggatgcactttgaaaatactaggttaagtaaaataagccagacacaaaaagacaaatattatatgattctacttatatgaggtaactagaatagtcaaatacatagagacaaaaagcagaatggtggttgttaggagctggagggagggaggaatggggagttattatttaatgggtgcagagtttcagtttgggacaatgaaaaggctctggagatagattgcacaatttgaatgcattgaatgccactgaactgtgcactggttccagtatatagggaagatctcacgatgaagggatctgcatttattcagccagtccatcaacccactcatgtagacaacaaatatggattgaatgcctactatgtgcccagcctagtgctaggttctgggctacccaaaaagggagtggctgaaatggtagactctggactacagaaaccatgagattcaggtgggaatccaagatcaatggactcatcaggagttaagcttgtctttctctgaaatatggggattataattgtttctacttcctggatttgttgggttcattcagtatgcattccatagtgaaactattaggaaatggattttggttttgaggatcatgataggcctgatttcatgaatggggagatacagacgagtgattccaacatagcctgtctgctaagcactatgatcttagaacaggtatcaccaggtaagcatcagaatgcaacatccccatatcataaacacagtgcaccatcctcggtgctataaaattatgagtccccactcaaacgtcccactctgattaacaccagaaattctgccatccacctggtggatcatttgttgtgaatgttgggatgttatgtttcaaaaaataccttgcaagtacaatgcaactgcaaagcaagtggactacaaaatgaagccggtcactttgtgaaagatgcaagaatgtatgaatttaatgacagtgatacaacaaagttaaaaagagcacatattgtaactccataagggctttgaagagaaatttttttttttttgacacggagtctcactctgtcacccaggctggagtgtagtggcacgatctcggctcactgcaacctctgcctcctgggttccagggagtcttctgcctctgcctcccaagtagctgggactacaggtgtgcaccaccacctgtatttttacttggctaattcttgtatttttagtagagacagggttttg[131 bp omitted]atataatataaatatatataatatgtatattatacataaaatataaatatatatattatatatttttaaattcaaaggattaagaagggcccctaaaaattaatatagtcctagaattagtcttagaatacttatacaaaactggctttctttatgaccctttgaggaaagtgtagaatggaagaagacaaagctatgcactggaaaatcgtaacaattttgtcaggaaagtcctgcatcccaattcttttcattctcaagaattcacctttggtcataattcaagctaaattctgttataatatataaggttttaaaaatacccttatttgaaataaaaatgagtctcattttttcagttaaacccaaatcgaaattgttttatgcagccataacaaagaacaaaatcatgtcctttttagcaacatggatgcagctggaggccattagcctaagcaaattagtgcagaaacagaaaaccaaataccacatgttctcacttataagtgggaactaaacattgggtgcacagggacacaaagatgggaacaataggcactggggattacaaaagtggggaggtaaggaggggacccaggcttggaaaccaactattgatggccgggtgcagtggctcatgcctgtaatcccagcactttgggaagctgaggtggactgatcatgaggtcaggagttcaagaccagcctggccaacatgatgaaatcccgtctctactaaaaattagccggacatggtggtgggcgcctgtaatcccagctactcaggaggctgaggcaggagaatcgcttgaacctgggaggcagaggttgcagtgagccaagatcgcaccactgcactccagtctgggcaatacaagactctgtctgaaaaaaaaaaaaaaagaaagaaaaagaaaaagaaaactgcctactgggcactatgttcattatttgggtaatggcttcaattgaatcccaaacctcaccatttatgcaacatactcatgtaacaaatctgcacatgtacctcctgcatctaaaataaaattttttaaaagaaaaatcttttgaaagaagccagagggggaaaaataccttacctacagagaagcaaagataagaattatgtccaacttctttccagaaaccatgaagataagaatgaagcatttacagtgttgagagaaaaaaaagtcttcaatctagaattctgtaccctgcaaaattattcttcagaagtgaaggagaaagaaagacaaagattctcagacaaacaaacattgagggaatttgctaccagaaaacctgccttgaaagaaatgttaaaagttcttcagagatataaagagaggaagcacattagaaaaagagtaagtaggcccggcatggtggctcacacctgtaatcccagcactatgggaggccgaggcgggcagatcacctgaggtcaggagttcgagaccagcctggccaacatggtgaaaccctgtctctactaaaaatacaaaaattagctgggcatggtggtgtgcgcctataatcccagctactgaggcagctgaggcaggagaatcacttgaacctgggacgtggaggttgcagtgagctgagatcacaccactacactccagcctgagtgacagggcaagactttgtctagaaaaaaaaaaaaggaaaagaataagtgaatgtaaataaaatgaaagcatgtgaaatgtgttcaggagcttatgaagtcccctgaacccgatcacttttccagaggatgagcagtgaatttcagcatcgtcaacagcatatattggcattcttgcagttgcccgcaggaggatatagtttatcagactttattcttccaagctacggagccccagaggagggaggagtctggggaagctggtcgaacagactagggaaaaaaagctgcagtggcctccctatcgtggggaattgctgtagcctgctacatggtagtcctacgatcctaacttggccaagattcttgtttgggttcaagagctgggtcaggagtcttcccaaagtgctgcacttgctgttccattctatgttcaatggaatacagcacaagatagaagacaaaacttacgaatctagagaatgtcagaaggcctggaagagcactggtgaagagcaataacaatgaatggggaggagttggggtccttgggtaccaaaccatgggaggctcatcccccagacaggagagccgcgtggcctctgtgattgcttcttccttggttttgtgctgtagaattttactggtcaggcatggtgatttacgcttgtaatcccagcacttttggaggctgagccaggaggactgcttgaacccaggagttcgagaccagcctgggcaacatagcaagaccccatctctgcaataaataaagacacaaaaattagctgggcatggtggcgtgcacctgtagtcccagctacttgggaggctgaggcaagaggatcacttgagcctgggaggtcaagactgcagtgagccgtgattgtgccactgcactccagcctgggtgacagaatgagaccctatctaaaaataaaataaaataaaataaaaataaaaaaaatctagacaaagtaccatagactgtttggtctagagcaatagacatttattgtctcacagatctggaggccagaaggccaaaatgccagggttggttccttcttaggagctcagaggcagaaactattccatgcctctctccttgcttttggtggctgctggcaagctgtggcattctgtgacttgtggcagcatcactttaatcttttcttgtgactatgcgtgcttgtcttccctgtgtgtgtctgtttcctcttcttataaagataccagtcattggattagggccaacccgtatccattgtgactacatcttaattaccgacatctgcaaggacctatttcaaatacagtcatattcacagatctctggtaaacatgaattctggaaggacactatgcaatgcaaccccagacagtgaggatgaagacgaagaatttgagtgtcactagacaatccagtttgtggaggctaaaacacctctgtcttgggtgctaattcgccgtgttggtttctgattaaccccgtcctcggaatgtccctacaatttctattttatctactgttctttgtgtaagaacacgtactacatgtacttagtacttactttttttttttttttttggagacagaatctcactctgtcacccaggttggagtacagtggcgctgtcatagctcactgcaggcttgacttcccaggctcaagtgattctcttgcctcagcctcccaagtagctggaactacaggcacacactaccatagctggctaattttcaaaagttgctgtagagactaggtcccactatgtttcccaggctggtctcgaattcctgggctcaagcaatcctcccaccttgaactatgcatggccagagcttgtctttactattgatcctgcccttaggtcaaaacaaccttgatcaaagaacctttaggcagggctgggtgtggtggctcacagcactttggaaggcggaggtgggcagatcgcttgagctcaggagtttgagacctgcctgggcaacttggcgaaatcttatctctaccaaaattacaaaaaaattagctgggcatggtggtgtgctcctgtggttcccgtactgggaggctgagttggaggattaattacttcagtcccgggaggcggaggttgcagtgtgctgagatcacaccactgcactccagcctgggtgacagagtgagcccttgtctcaaaaacaaataaaataaaataaaaataaaaattacaaaatcagaaaaattttaaaaattaaaaaaagagaaaatcctgccgttttcagtaacatggatgaacctggaggacattatgctaagtgaaccaaaccattcacagaaggacaaatattgcacgattccacttgtatgagaagtttaaagtagttaaactcactctgtgagtatcgactactaaatccaaacccttatcctgcctctttaatactgtaatagtacttttggtactataatagtagtaataatgacttaatgataacagttctgttctgagcgtcacgcatgctaacccatttaatcttccagcaaccctgggagtcagcaagaatcacgatcctcctgtttcagatgtgggaactcacagacatccaggactcaaagtcttgcttgaggccacaggctaagcttggttggaacccggagatgctggagggaaaactggtctcctgagcttgccaggagcagagttgagtgggacagaggaggcgagaggagccttcagttcttggtgagtgggggtgcatgagagctcttagccatggttcctcctcatcctctttaaataataatggctcttgcaatgcaagattcacattttagcacaaacgtttgttgacatcaaacgatcggttggtgggcagtcctaccgcaccaaagcctgaactggcaaaagtgaaaaccccagagttctgggtgcacgaagcatgtccgggtctacacacctggacagttctccccgcaagggaccccactcccatgtaatcccttaggcaacccatcaagttggaatagtaattacatgttggacatggcaaattcctagccctggaacaagatcactcaatcaagtcctttgtgaagtcttgccaattcaattattttttctttttcaggctaggcgtatagctgatttagcatgtgccatacacatggtctgtttcctcttctgtcttcccactagatcgtgcactagtgggaagaggtgggggtgcatatcacatgctcatgagtggagatgctcatgctatttagtctctgcatctgtgcatccagcaaacctatcaagtcaccgttttattattattattattattattattattattattattattattattattttgagatggagtcttgctcttgttgcccaggctggagtgcaatggcatgatctcaggtcactgcaacctccgcctcttgggttcaagtgattctcctgcctcagc[207 bp omitted]gtgctcctctgatgaggatgaggaggaaccatagctgagagctctcatacatccccactcatcaagaactgggactcccttcacctcctctgtcccacttgactgctcctggcaagctcaggagtccagatttccctccagcatctctgggttccaacgaagcttagcctatggcctccagcaagactttgagccctagatgtctatgagttcccaccttccgcttatttgtgacgacatcttattatctgcaagccggattgctgtggggacccagctgttattgtctgtattgaattcgaccagcatcaaaaacttgcagtttgctactcagtagctcaaaagaaactcttaagagacaataggctgtgtgcggtggctcctgcctataatcccagcactttgggaggctgaggtgggtgaatcaccgaagatcaggagttcgagaccagcctggccaacatggtggaacctggtctctactaaaaatacaaaaattagctgggcatggtggcacgtgcctttagtcccagctactcgggaggctgaggcaggagaattgctcgaatctgggaggctgaggttgcggtgagccgagatcatgccacagcactccagtctgggtgacagagcaagactccatctcaaaaaaaaaaaaaaaaaaaaaaagagacaataagtccaggaggcagatgcttgcaagggagagagagggagatagtgaataggcaacagttctgcagatcaaaagtagactagcaccacatcatttaaaatacaggctaacgagcccggggcccatgagtttttattctctgatgcattattaaaagaaatgcttcatcagtaaggctctgaatagcacaagtattatgtggaaaaatatgacatccataaattaggagaccagacattgacagcggagaagctttaggatcgtcttaatttgcctttttccacttatctatattcctttttatgtatctacaaacatgatgtctgatttaaaaaaaaaacctgtggccaagtacagtgttatttttcagtaagtataaaataattctagtggataagaaagcagtggtcatagttacattgggagtatattttcttttctgttctttaaaaaaaaatagcaagcagtgttatttttttttaatgcaaagatgtcctgaagaatacttaaaagaaatatctgcaagatcattcttcttggtcattccataaaaaattgtttttgaaactatgcttagtcctcatcaaacgttgtcagatgcatccatagtgaattcccttcttatttttctatttcgcttcataattgttacaggcaacacgactttggaaaaggaataaaatcgactttatgaaaattagtctcattttcaaaacctctgcaggaggcatttaaaatctcctagcatgaagggaggagacacatggttttcaagtaacatgtcactaggattttccaatttacattcttagtctttcattattttattagccgaactttcttattttttaaaaaatctttacctatggattgtgtttctgacatggaagggagagtatctttttctttcttaaggtacctaaagcaagggagactgttgccctccatggcgactgggatttgattacatacagcagccgatgtgcaggactccgtcccagccagggtcacctgtctcctcaccttcttccagaacgttaaatacagcgccgaccacaccaccgaccacaccgcgaatcaggcagacccaaaccagcaggagccccatgtgccgggccatgctcctgtcagacactcgtggtcgaccagctgatgtccaagattttatagcccctggaactaaccacaaccacttcccctccctgtccctcctctctttccctcctccccacttcttccttgtccctctcctttttcaccttctcctcctcctcattctttttctcccttctccttctcctctcctcctcctccttcctttcctcctccttcttcttctcttccttctcctcctcctccccctccttttcctcccctcctccttttcttctttcttcccctcctcccggtcatcctcctcctccctctctttcccctctgtctccccctcctcctcctccccctcttcctcctcttccctcctcctcctccttcccctcctcctccgtctgctcctcctccccctcctcctcttccttctctttctcccctcctcctctcctcctccttcttcctactctccctcattcccctccttctctccctcctcctcttccttcttcacctcctccccccttctcccccctttccctctttctcccctcctcctccttcctctcttcctcctcttccctcttccacctccttccctgcctcttctccttcctcctccttcccctcttccccttcctcctcttctttcatctttcatccccaccttctccctccttccttgctctcactctgctccaaagttaagctatctaccttgcataggaagaaatatagaaaaagaaatacttaaaataacagggaagatgcaagctgaggaatttcgcgtcgtttccacgaagagaagcatcagggagcccatgggcagtcacaggcttcccggtatctcagatcttcctggtctttgtcagccagggctcaagaatcccctggagaggcccagggaggcttcttggaaaagcaggtttgcttccctaatataagcacctttgttgatgctccacaaaccttcagtgtgggccactgttctctggaggcccttggtgattaacctaatgggctgcagatggctttgaagttctgaggaacaagtggtgcagccttatggacacctacatttccaactatgaaataaataaataaataaataaaagtatttaaaaaagaaaaatcagattaatcctgaattctgaaacccaacgtgttcttagttactgttccttttttttttgagacagaattttgctcttgttgcctaggctgtagtgcaatggtgcaatcttggctcactgcaacctccgactcataggttcgagcgattctcctgcctcaccctcccgagtaaatgggattacagaagcctgccactacatctggctaatttttgtatttttagtagagacagag[138 bp omitted]tcacgtctgcaatcccagtgctttgggaggttaaggtagggggatcgtttgcaaccaggagtttgagaccagcctgggaaacataatgagaccccccatctctacaaaaaaaaaattgacgaattagccgagcatggtggcatgtgcctgttgtcccagcactttgggaggttgaggtaggaggatcgtttgcaaccaggagtttgagaccagcctgggaaacataatgagaccccccatctctacaaaaaaaaaattgacgaattagccgagcatggtggcatgtgcctgttgtcccagcactttgggaggttgaggtaggaggatcgtttgagcccaggagtttgaggctgccaggagctatcatcgcaccactgcactctagcctgggcaacagagtgagaccctgtctcagaaaaaaattgtggaaaacgggctatcttttcatctccatttttttttctcagtaagatggaatctcctttggaaaaaagtgtcaaaagaaagccctccccccaactaaactgtcaaaaatgtcagcaactatcaaattagaaactcttatgaaataaaagcctatccaagactttaaaaatacctttgaggaatcctagtttttggaaatgactgttgccttcacttatttctaacatttcttttttcttttctttttttttctttcttttcttttttttttttttttacatggagtctcactctgtttcccaggctggagtgcggtagcgtgatcttggctcactgaaacctccacctcctgagttcaagcgattctcctgcctcagcctcccaagcagctgggaccagaggcgtgtgccagcagacccagctaatttttgtatttttacaaaaatacaaaaattttatttttggggtgtgctggggtgtgccagcagaccccagcagagatggggtttc[133 bp omitted]cagatcttgattatattctacaacataatgggtggtctctggcacactgcctttttgctattattattgatactttatgaagaccaagtgtgctaagacattgtacatttgcggagccacccattctcccctttaacatctttgtttcatgtcactcttcactgcattgcatgtcatcagtttcccattctgcaagtatttcttcaatcagtttccctttattattagccatacgagatccaaaaatcccttagcaggttaatgtggactgggtgcagtggctcatgcctgtaatcccagcactttaggaggccaaggtgggtagatcacctgaggccaggaatttgacactagcctggccaacctggtgaaaccctgtctctcctaaaaaatacaaaaattagctgggtgtggtggcatgtgtctgtggtcccagctacttgggaggctgaggcaggagaaaggcttgaacccgggaggtggaggttgtggtaagccaagatcataccattgcactccagcctgggcaacagagcaaaattctatctaaaaaaaaaaagaaagaaagaaaagaaaagaaaatagtagggctttttcattgttcagctgaaacctctccagctcctcatagctgaatttctgggaacgttccctcctctgttcattgatattcttgtccctgaccccagcccccgcaaggccccttctgtgtacacttgactgaattttatgggcctcgtggatatgcatgggcttatctccagacatcataaattaaccacagctgatctcatccagactgccttctgacagtaaccactgatgaagaaccctcctttgagaagctgcctttgtgtcctacagacaggctggggccaaagccattcaaccaatccccagataatccagagctcttgggagcagaaccttaaagagagatcgtggagagagccagggcccagaagaactctctcaaaggtacattttgacccggaaacttgggagggtgtgacaagtggggtcttagggcccccatagcaaagaaggaaggtctagagcatcatggtgcactagaaatataatacgagccacataaatcattgtaagttttatagcagaagcactttaaaaaactaagaagagtgcaatttattttaataacatgttctgtggaatccatgtatatctaaacgattatcatttcaacacataatgaatacaaataattattaatgagatactttacattttttccctatactttgtcttcagaatcaataggtatcttacacttacaacatagaacaatttgaactttcccatttcaagtgctcaagaaccagaagtagctggtggctgccatattggttctggaaggggacagccagagaaagtagggaaggtggtcttgtgggtgaggtcctttctctgttaataaactcaaagaaatgggttaaaccagattctatgaatgatgtaatgctaaggaaggttgcctgaatcccaagcttagggaagaaactgaagaaaagggaacaagttacctgttaagagactgggtgaattacttattaaattcttggtagtggattaaaatcttcatggttctgtcaatgtttggaccatttctccaaggtaaggcttactctccctattttaggaaaaagaaagttgagattcaaaaagagcttactgagatcctgttgcttctccctccaaaggcagcctaaatatgtaatagaagaggtgtgtgtgtgcgcctagaggtggagggaaggcttacactgaagttttgtttcagatctggggtcatttgctgctgagaagcagaaggactcattattttgaaggtacactatacttcagtgactttacagccccatgtgtgcctgtaattattcacaatggcttctatagtttaggttttatctccactaaacagataggaatactgacttggagttcagagaggtgaaatgaccttcccaaggccacccagttgaaacatgggagaggtaggatttgaaccctggttggttgggtgctattatcttctcaccgctccactgtgaaattattttggcttaagagaacgagagggcagaggctgtgggctaagctgcctcttgggcaccctatcagggccttaatactaccagttgtatctgccattattttccatgttgggtggtagatattggtgccaatgtcttatctatagctgtttgaagacagctatcatatctggttcctcttggtacccaccacatttccttatagatgatagggttcttgaatactcattggatgggtggtggattgaaggaagattaaagaatgaaaggaaggatgggtggatagaagaatggatgaacagtgaaagaatggatggatggaaggatggatgagaagtggatgaataaactgaaggatggatgaaacgatttatctctgattgttgaaggcagaaatcatgtatggttcctcttggtacttgacacagtttcttatggatggtgggtttcttaaatacttatttgatgaatgattgatggatggatgataagaggatggattcaatgaataatggatgaatagaaggataaatgaatggacagatgagtggatagatagatggctggtgaaagatgggcaaaaggatgggagaattgatagacagatggaagaatgggtggaaggatgaatgggtggatgaattgatggatggatgtatggatgatggaagaagatagatgaaaagatggatagatggaggaatggatgtaagaatgggtggaaggatacatgggtggatgggtggatggatggatgatgaaagaagagttggtaaagggatggttgatggatggatggatgagggaatattaacaatgaagagtatcattaagcagagaaaaaatttctcagaaggtaatattttcaggaaagtttgaaagccaataaataacaaaagtaaaagaagagaattagaacattctcaaaatgtttgcttaattaattaattactgccggtctagcatggtgaatgaatgttatcatcatcatcatcgtcatcattaatggccaacatttattgtgagttatctctatagcacgcattgtcttaagcattttgtatctttcatctaattcaatcctcccaacaactctatgaagtagaactgtttattagcatccccattttatagaggggtaagctgtgaagtaccttattaaatgtcactctgctaggcaccactgaaacatccacacaggtttttaattactggcatgccagtggaattggaatgccaacaccaagaggccccggcacagcgctttgctctatagatgttcaataaatttggtaagtcaataactacctcataaaattaatccattcctaagacagccatctcattgttgcagatttttcattttgtgattttaaactgcctcctattgctttactcagggtgttctatcttttttaaaaaccattttaactctgcatgttttcatgtgagcatatgtgcatgcatatacctgtatatgtgcacatatgatgtgtgtatattacacatgcctgtatacatatatacacatctataatgtatacaggcatgtgcacgtatatgtatatacacattatgtatgtgcatatacatgtataattactgtttctaaaatgttttattgatacacaacaattgtatatatttattgaggtacgcgtgattttttttcttttccttatttatttatttaatagacatggtgtcccactctgttgtccaggctggtctcaaattcctggtctcaagtgatcctcccacctcagcctcccaaagtgctgggattacaggtgtgagccactgatgtgatattttgatacatgcagacagtaatgatcaaatcagggtatttaggatatccattactttcaacatttatcatttctttgtgttgggaatattgcaactcttctcttctaggtatatacataattaaattgtttttaaagacataagtcacacatctgtgataaaaacttaattggaaagaagtctcctatttacccctggttcccacttccagaggtgattgatatcagtggcttctcacatgcccgctcaggaaaacactctgtacatgtatgtgcatggggaacacagatgcagtgtcttgctgagaactacaaggctctgacctaggtttgctagtgtcaccatcttttcgttcctctgcacttactccaaaattggtagtcagcagcttccagtaaaatctcaaggatggcctgggcgcggtagctcaatcctgtaatcccagcacttaggggggc[134 bp omitted]gaggcaggagaatcgcttgaaccgggggacagaggttgcagtgagcttagatcgtgccactacactctagcctgagtgacagagtgagactccatctcaaaaaaaagaaaaaaaatcaatcaatcaatcaatcaatctcagggattgggc[187 bp omitted]ggtggtgggcgcctgtagtcccagctacgcgggaggctgaggcaggagaatggcgtggacccgggaggcggagcttgcagtgagccgagatcgcgccactgcattccagcctgggtgacagagccagactccgtctcaaaaaaaaaaaaaaaaaaaatgcagagtccaaccttttgggggacatttcactggaaagggaagaaagtctcagacgagcttgtgtacaagtccagtaaacacaccgcgcatgctcacttcccaagcctaaaggaggcactgcgcatgcgggaggcccaccctaaggggaaaaatgaagggtccagccatgtggccctcccttctgtgcgtcagaacatgtcacattgtttcccacatcagcagctttgccctcactgatccctgtgcctggaatgcttgttcctcacactgtgtgtggctgactctaggttttggttcaaacatcacctgctcagagaggccttccctgaccaccaaaggagacatctgtcaggcatgattgtttacattcccctgtttattattttttttcattgcacttttcatattctgaaatgattttggttttggttactgtggtagaatacacataagattatgattttaactattttaaagtgcacaatttagtggcgacaagcacattcacaatgttgcaccatcatcaccattatctatttccaggaacttgtcaccaccccatactgaaagcctcatttctttttttttttttttttttgagaaagagtctcgctctgccacccaggctggaatgcagtggtgtgatctcggctcacagcaacctccacttcctggcttcaaacaattctggtgccttagcctatggaatagttgggattacaggcatgtgtcaccacgcctggctaatttttgtatttttagtagagatggggttca[142 bp omitted]atattagcctcatgcaagaaggaatttcacctgtccagtctaccgacaactccacatagtaggaggaacacaacaaatatttatcacatacgtgattttttttttttttttaggaaatggggtctcgctctgtcattcaggctggagtgcagtggtgcaatcatagctcactgcagcctcaatatcctgggctcaagtgatccttccccctcagcctcctgagtagctgggactacaggtgtgcaccatcttgctcaactaatttttaatattttgtagagaaggagggggtctcactacgttgcacaagctggtcttgaactcctgaacacaagtgatcctcccaccttggcctcccaaagtgctgggattacaggcctgagcccgcacgcccagcctatgtttaccatgattatttgttgagcactcagcatgtgccaagaactctgcttacattgtatcatttcattcttcccccaccccggccgccccccaaaaatcctgccccctcccccatcccccatagatggagtctcactctgcccaggctgtaatgcagtgagccaagactggcacgatcttggctcagtgcaacctctgcctcctgggttcaagcaattctcctgcctcagtctcctgagtagctgggattacaagtgcgtgccaccacgcccagctaatttttgtatttttagtagagacgtggtttcactatgttggtcaagctggtctctaactcatgaccttgtgattcgccctcctcggcctcccaaagtgccgggattacattcatttcattattaaacagtcctacgggatagatttcagttgtctcatatatagaaaagaaagctgagagtcaaatacattccataacactctgaaggtcacacggatgagcagaaattcgtatacaggctacccttttccgaagccacaaccacttacgtatttctccattgtggagatgaggactccgagctgtgcgtgtgtccatggagccacacagctggcttgagagggagcctaaggttagacacctttgctccgtacctgttccaggatggctgattcaaatgggacagagataatgaaaatgataacgattaatatttacaaagcacgttttatgtggcaggcagggttttcagccccctgtgtgtgcattagttttctgcagtggctgtaacaaatccccacacacctaaccgacttgacacacatttgttctcttacagttctgtgagtcagtctcactggggctaagatcagggtaccagccaggctgcattccttctggaggctgtagggaagaatccgcttcctggcttcttccagcttctaaaggtcgcctgcattctttggctcgtggcctcttcctggcataactctaacctctgctttctgttgtcacacctggttttctgactctcctgcctctctctctgttttttttttttttgacacagagtctcgctctgttgacaggctggagtgtggtggtgcaatcttggctcactgcaacctctaactccctggttcaagagattctcctgcctcagcctcctgagtagctgggattacagctgagtagctgggattacaccacacccagctaattttttttttttttgtagtagagacgtggtttcaccatgttggccagcatggtctcaatctcctgacctcatgatccttgtgatccacccgcctcggcatcccaccacctctcttttataagggcccttgtgatgacattgggtccatctggggaatcccggatcatcttcccatctcaagatccttagctttatgacatctgcaaagtcttccacactcctttttttgagacagggtctggctctgtcacccaggctggatcatagctcactgcagcctcaaaaccctgggtgcaagtgatcctcctgcctcagcctcttgagtagacaggactacaggcatgtgccaccatgctagttttctttctttttttttttaagattgtttgtagataggggtctcactgtgttacctaggctgatctcgacctcctgggctcaaccagtcctcccacctcagcctctcgaatagctaggactgcaggcatgtgccaccatgctggctgtttttttttaattttaagattttttgtagatacgaggtctcactatgttgcccaggctgatctcaaactcctgggcttgagtgatcctcctgcgtcagcttcctgaagtgctgggatgacaattatgagttaccatgactggcccgcaaaatccactgtgccatgcaacctagcatattcgtggactctaggaattaggacgtggacagatttgtgttgggtgggtattattctacccaccaagcgtctatgaacgacactaacattctgtagcagcaacagtgatcaccatcccttccactgtgcggatgaggactgagacccaggaaactcagtactttgttggggtcacaaaggtagtaagaggcaaagcatggaaacccaggtggttgggctccagggcaggctctttctggcattataaccttctgcctgtctggatcttagcatctaagccaaaaattattcatttgaatcttgaggagaagggtcaaaatgaaagcttgaggttaatgaaccaattaaggtgtaggaattggggttttgggccaggcaggaatataagcatgacactgcaggtagtcaagggtttagaggaggtggcaaaatttgtctctcccccatctccataaatagtaattaaaacatctcgcttgggccgggcgcagtggctcatgcctgtaatcccagcactttgggaggcccaggtaagcagatcacttggggtcaggagttcaaaaccaacctggccaacacggtgaaaccgtgtctctactaaaaagacaaaaaaatagctgagcgtgatggctcgtgcctgtaatcccagtgactcaggaggccgaggcaagagaattgcttgaaccggggaggcggaggttgcagtgagctaagatcgtgccactgcactccagcttggggtgcagagcaagacttcatctcaaaaacaaacaaaaattctggcttgtatgctgtcttcataaatagtaatgaaaatatctggcttgtatgccccctctgacatttacacagtgctttccagcatctgctgcatgtataagatcccaaggtggagtttattctccctcatttgatgattggaaaaactatccccatattttcctgtggtttgactccatagccacagcaaccctttttccgaccagccaagaaacagcagcggtggcaggatgctggtcccaaccaccccggggctcaggacagagggttctccaagcatctgaacctgccagtgcccaaagcataacttggtcctcacctggatgttccagacgagacatgggtgtctggctattagggcttgttttacagttgaataattattttgaatggcccctaaaatattttctatgaatatccataacttggtctgtgcagagtcataaaccttccagaccatcagttgctaccaattcttcgaatttgcacagaactctttattgcacaaagaagcaagccatgcaaatagctggggtcaagggatcatcccaggcaaagagaagagcgagtgcaaaggccttgaggtggcttctgcaggaaacaactaaaaggcagatcgagggaggggaaggaagataagaaatgagtttgagggaaggcacagtatggactagggattgtattctaaaggtgatggaggattttgaatgaataaatgccacccctgctctttttttttttttttttgatggagtcttgctctgtcacccaggctggagtgcagtggcacgatctcggctcactgcaacctccgcctcctgggttcaagtgattctccttcctcagcctcctgagtagctgggactacaggcacctgctaccacgcccagctaattttttttttttttgtatttttagtagagatggagtttcaccatgttggccaggctggtctcgaacacctgacctcagacgatctgcccacctcatcctcccaaagtgctggaattataggcatgagctaccgtgtccggcccactcctcctcactttaacccctcccgtggcttctggttgcttctattctattctattctattctattctattctattctattctattctattctattctattctattctattcttttgagacagtcttcctctgttgcccaggctggagtgcagtggtatgatctcggctcacagcaacctctgcctcctgggttcaagcgattttcctggctcagcctcccgagtagctggaattacaggcacgcaccatcatgtggagggaatttttgtacttttagtagagatgaggttttaccatgttgaccaggctggtcatgaactcctgacctcagatgatctgcccgcctcggcctcccaaggtgctgggattacaggcatgagccaccacacctggccttctggttgcatttagaatctgagggaggctctacagggtccggtcccatccatctcaccatgcatctctgtggccttgctcctcctcacttgttgtagagacgaggtgtcactgtgtggcccaggctggtctcaaactcctaagcttaagccatcctcctgctcagcctcccaaaacactgggattataggcatgagccactgtgcccagcctgggccttagccatgcgggtcccacttgctccttgagcacatctagctttttccatctcaggcagtttccacgtcggcttctcctgcctggatgtatcccccacccccatacctccagctcctctcacgtctccctcctccatctgttcctccaggtgtcagcttacctgtcatttctcagagcaccctcccctcacctctcaatcaaaagtgaccttgtcctagttgttcctgagactcgtccacagcaatgatcacagcgaagagttgtatttgtttctggtttcttcgcttcatatctgtctccttggttgactctcagccccacgaaggcagggcctatgcctgctttacccactgctgcatactcatcgtgtagccctggccccacatcttttaaatgctcaataaatactcattcctgagtggatgcataaagcatgcatcaggaaagggcccatactgggcacagtggctcttgcctgtaatcccagtgcttaggaggctacgcaggaggatggcttgggctcaggagtttgagaccagcctgggcaacatagcaagacctcgtctctacaaacaataataatagtttaaaaattagctgggtgtggtgatgcgtgcctgtagtcccagccacttgggaggctgaggtgggaggatcacttgatgggagatggaggctgtagtgagccatgatggcgccactgcactgcagcctgggtgacagagcaagaccctgtctcaaaaaaaaaaagaaaagaaaaaagaaaaaaacaaaaagagaaaaagagctcagccttgtagaggagagaggctggaggctgcatatcagtgaggcaacaggacaacagttgaatagttgagaagagaaatgaaaaaggccttcctttagtctttaacagcagaggcaggaaaagcggatagattcaggagctccagaaagtagaaccaactgactgatagaacacagcaagagacagggacagcagatctacactgggggctacaactcaggtggttgagaagaacatagtgcaattaaatgaagtaacatgggggaaggatagcatattttgggctgtatctcaacagccaaagcttggaatttgagatgcttgaaggacatctaggtggacatgtctgggaggcagttgaaaatacagttctggctctcagaagtgaaacaatactatatgaacaatactattttggatgatatttatgagttcttagcacatgtccggtcccatgttaagcctagaggcagcatcgtacattggttaagagctcaattactctgaactgagtcagattgttggagttcacttgcaagttctccaacttgcatgatctgtaaccctcagcaaggtgcttaagcttactgtgccccatctgtgcatatctggggtagtaatggtacctaccacgttgggctacttcctatcaggattacagtgaatttagaatagtgtgtagcactcaatgagttttatctgttttttgttttgttttgtgttttgagacagagccttgctgtgtcgcccaggctggagtgcagtggtgcgatcatagtgcactgcagcctcgacctcctgggctccagtgatcctcccacctcagcttcctgagtagctgggactacaggcatgcaccaccatgcaaggctattttttttatttttgtagagatgaggtctcactatgttgtccaggctgatctcaaactcctggcctcaagcaatcctcccatcttggcctcccaaatctgtcatatttttatgattgtcgttaatcatcataacaaggctgagtggtagataggattagcatcctcatgttttgacacgacgaaactgaggcttagaaaatttaaggttgggcccagtggctcacgcctgtaacactagcactttaagaggccgaggcgggtggatcatttgaggtcaggagttcaagaccagcctggccaacgtggtgaaaccctgtctctactaaaaatacagaaattagccaggcgtggtggcacgtgcctgtaatcccagctacttgggaggctgaggcaggagaatcgcttgagcctggcagatggaggttgccgtgagctga[132 bp omitted]aaacggtggagctgggatttgaatctgactcattcatcctgcattgtcaggtctaagtcctgactgagccactagccaaagagaatgagagtccttcacaagtagtgaatgagacatcactcagaaaaagcctgtttgaggcatggtgctggggttaagagtaaaaggcttcaaggaagaacgacaagaaaaagggagaaagacactttgatgtgtagcgggagagccaagcactgttgggagaggaaaaaagtttggggcgtgttgtgtggctcagatactcagtggtgccacctacctgtgggaggacttaaatcagtaactttgggattttgattcctggcggtatctgggtttcttgctaaaagttggttccatctgatgccttcccgagctatcctgaccttggctttaataattcataaatgccactaacgatctacaagtgaaaagcattttcacatcaaggtctaattggaccctcgtggccacccggagacacaggaacgactaaatacattctgcagatgaggaaacaaaggctcatagaggggaaggggtttacgttgcctaagaactctgacactagtatagacaggcccgcactgactctgagatacatcacgtaccagctgtggtcctttggtaagttacttaacctcccaagcctcagtttcccttttctgtgaagtggagatgatcatgcctgcccttagattttcaggagcaaattggattgtggatacaaagcttaggacatccggtatacagtaagcagtcaataattgggagccagccgtagaagtggtgatagtagctgagactcaagtcaaatccagaccaccaattccaaactgtgggttcttgttgctgctgagaatggcatggtcatctgtcatcaaggaaacggcacgaaggaaaatagagctagtaataactatggttaatgaggacggtaaatgctaatcactgaaggactttcgtctccagctaaggagatgagtgtgattcatggggaggatttaaggctattgttaaggttccaacaatgagaagggcccttgcagccattaatatgggttagaacccagaccctgccctttcctccctgggtgaccaatccaggtctgagtgttagtttctgcatctataaaatgggggttaaaacatgtattacttgatttatgaaagccaagtgacataaagtgtgttgaacatcgagcctggagtacagtaagtgttcaacaagtgtttcatttttttctttccatcacactttcctaaggacagtacatgacagtagagttatgcatcaggaatacagtctgagaagtgcattgttaggcaatgtcgtccttgtgtgagcatcatagagtgtactcacacgaacctagatggtagtgcctgctacacacctgggctatatgatacagcctgtgcttccaggctacaaacctgtacatacacacatgtagaaacacacacacatatcacacacacatatgtagaaacatatgtgtgtgtgtggtatatgtgtgtgtatgtgtgtatttagagatagggtctcactctgttactgaggctatagtacagtggcacaatcatagctcactgcagccttgacctcctgggctcaagtgatcctcttgcctcagcctcctgaatagctgggaccacaggcatacaccaccatgcctggctaatttaaatgaaaattttgtagaggtggggtctcactatgttgtccaggctggtcttgaacttctggctttaagcgatcctttgtcttggtctcccaaaatgctgggattacaggtgtgagctaccatgcctggtctattttttaaattactgtggatggaaagaaaaatggcatgtatgacgtcaaatctaggaggtaatgggaagaggaaggggacgtgtgggatgaaaatttttgtcttcttttccacagagaagagggcagccaagatgacccgatggtccagttacctgttgggatggacaaccttccttctctattcctatgagtcaagtggaggtaaggacactcaaagcaacagggaggatttagaagctggagaagaatgaatggggcaaagcaaagattcctggaactaagtaggcaggagatggcttagcaaaaatctcagaagaagctgggcgcggtggctgacacctgtaatcccagcactttgcagggctgaggcaggcagatcacttgaggtcaggagttccagagcagcctgcccaacatggtgaaaccccatctctactaaaaatacaaaaattagccaggcatggtggtgagcgcctgtaatcccagctacttgggaggctgaggcaggagaatcgcttgaacccaggaggtggaggttgcagtgagccgagatcgtaccactgaactccagactgggagacaagagcaaaactccctctcaaaaaaaaaaaaaaaaaatctcagaagacctggggtttggaccctggatctgccacttcttttcttggtaactttggtcaagcaacataagctctctgaagtcaatttccagactgtaaaagagaagtaacggcatttatctcacggggttattttgaagatcaaataaaataatgggcaccagcatctttcataatgctcagcacatggtgggggtaaaaggcaggctatataattccagtgaacagaaccttcagaccccaacctggacaacctaattatatcttaatatatctcagaatctaaattaaccactaaaagactgtaaggtaagcatggaaacagaacaagaggaaaccttgcttacatgtcattcactcaagccttggtgagtcattcttcacaattagaatccttttctgcctgataaatcgttctcctctggataaggctcaggaaccatttgcatattgatgcaccttgatcccacattctttattccagagattcctaacctggggtcattgagtgaggattagagtccatgaaaactggaatttacgttttaaaaaaagtgtgtatttatgagggtagtgagaatagctattgtaacaaacaaaatccaaactatcagctgcttgacacaataacattttttttttcttggttctgcaaaatcccagaagggtgcatctggtcaggaaacaatgctccacatggtcattcagggatccaagcttcttacatcctggagccccaacatcccctacggtttcagagtctgctgaggtttctttgcttttagcttgtagacaagtatcaagagagtctggaggaccttggaggagagggttttttgtttgtttgttttcttttggccaggacaggaagtgacattcatccctttctcctgcttccactggccaaaactgatatggctcttaactgcaagcaagtctgggagatgcagtgtagcagtgcatttgggaggaaagtgaaactgatttcggtgaacacacagccatctcaaccataagggcatatgaatattctcctagagagaagttctgggttctcaaagaactgacaaattcctgaaagtttaggaactcacagtttattcagacaaggaacaatgtacttgatggggtatccacttttctagttataatctcatttttgtcatgcctccctgagaccacacccacatacttgtggtgaaactcagtattccaagttccctttgcgtgtatttacagataaattattcagtatacacttactgagtgatctttaagttccagacattgtgttatggaccagaagtgcagaaataaacaaaacctaaaccctccactcagagagttcacagtaatcgggagttatagacacataaatgaattatttttaaaaaattggcaactgcattcatttatagagattgactctgagtattataagtgtgaggaagagtattgacccagactgagccaagtcttcatggatgaatagcagggactaaagctgggaagagaggaaaggcattcaggacagggtgaagggcaggaccaaaatctcaaagacgagaaagaacatggaataaggtcaagggaatgttaatcagggagtgagaacaggcaggtcagcagggtctggattatagaggattgtaactcagttaagaagattaggccatctgctggattactttgcagatggctaatagtattcattatgtgctgattcttactaacgactcccaaagataaccttaattccacctacaggggcatctgccctctccctcaacacagtatcctatatactcagtggtgttcgtgactgaggcaaagcattgataatgacaataatgacagtgaagatgacaatgataatgatgaggatgatgatgatatgacgatgatgacaatgatgacggtaatgatgacaacaataatagcgacaatgacaatgatgatggtgacagtgatgatgatgacgatgatgataatgattatgacaatgatgtgatgaggaggaaaataatgattacaataatgatgacaatgatgatgagaatgacaataatggggttgatgatgatgatgacaatgattgataatgatgatgacaatgacgatgatgatcaccatgataatgacaataatgaggttgataatgatggtgacaatgactgatgatgatgacaattatgacgatgatgatgatgatggtgacaatgatgatgacgatgataatgatgatgtcaataatgatgtgatgaggaggagaataatgatcacgatgacagtgatgatgatgacaatgacaataatgaggttgatgataatgacaatgactgataatgatgatgacaatgatgatgacaatgactgataatgatgacaatgatgatgatgacaatgatgatcatcatcacatgataatgacaataatgaggtggattatgatgacaatgatgatgacaacgatgatgatgatcatcatcctgatgacaatgacaataatgagactgatgatggtgacaatgactgatgatgatgatcatgacaatgatgatgagcattatgatgatgccaatgacaatagcgtggagaatgatgatgatgacagtgatggtaatgatgatgatgatgacaatgataatcatagctaatatttattaagcagcagccatgctccaggtactcttctaagcactttccagatttaaactggtttaagtttcacaaaaataaataccaaacagttctgagaaacaaggtgaaaaatgcaatgaactaacagttgagcaagttgagctctcatcccaggtctacaaaaaaaaagcaatcaactttaattagtccttattgtacgtgggttttcatgtaatgaggaatttgggatagaatagcatttctttcttttttcaaaaaaatttacacatcaaaattctgcagaacaccgtttttgttttttgttttgttctgttttgttttgttttcagacagggtctcactctgtcacccaggctggagtacagtggtgcaatcatggctcactgtggcctcaactactcaggctcaaagggtcttcccctcagcctcccaagtagctgggattacaggggcacaccaccatgcccggctaatcttgtttgtttgtttttttgtagagatgggggtctcactttgttgctcaggcgggtcttgaagcgatccgcccacctcagcctcccaaagtgctgggattacaggcatggagcattgtgcctggccgagaacagcattttttgatatatttcagggaccattagtctctagtgccattgaattttgaaaaaaaagaaggacaactcgatatactgtattcatcaattctcattttcatattaacttttctgttgagtccttcattaaagaaacctgtttaactttatttcacgtggcatttttccaaacttattttattgtttctgttgtttcttgagcaaataattattctaggttctgtagatacactgcacaaaaaacaaagttcctgtactcattgagaagaataaggacgtcgaaagttgtcccctcaatatttgccacatctgggtaccaccagtactattatttactcaacatttttctttaaatttgcttacttttcttcactttaaaaaattcattttgggagattggttaacatcagtattataatataaaaaagcactaccactttccataaataggaagtacgaccaaaaagaaatactgtactatgaaaacaaaatcccattattaaattctgctagactatcgtccgaataaagctttgagtttgagtcctgctccccacccccctctcttttttgttaaaatgggagattattaagtattagagatgcagtagagaaatactactattaaattgaagctttctcttttgcgtaagcagaaggactaaaaggaccactggaaaatgatttttttctagtctatatttcaaaattatttaatgtgtgtccttacataacctaatgtgatcttgtgatccaccaaaaagtattttgtgtaatgtcattggccccccattttatgctctgagaaacagtggtctcaaggaacaacacaccacggttgtcttggttgtgtatgaaactcttccccagtgctcctggccccaacatgaactggatatgctctgacatgtcattaggaaattggatgctaagcctaggtgtgtagccttcaggccaccatgagaactgtctcagtccatttgggttgccataacaaaataccacaggccaggcatggtggcttacgcctgtaatcccagcactgtgggaggccaaggtgggaggatcacctgaggttaggagtttgagaccagcctggccaacatggcaaaaccccgtctctactaaaaatacaaaaatttgctaggtgtggtggcgggcacctgtaatcccagctactttagaggctgaggcaggagaatctcttgaacccaggaggtggaggttgcagtgagctgagaccagactactgcactccagcctgggtgacagagtaagacttcatctcaaaaaaaaaaaaagtaaataaaataaaatttaaaaagtaccattgactgcgtagcttataaacaatataaatttctgtctcccagttctggaggctgagaagtccaagggcaagtcaccagcagtttcagttgctggtgagggcctgcctcctggttcacagatggtgccttcttgctgtatcctcacatcgtagaaggggctagctagctctctggggtctcttataagggttcttatctcagtcatgaaggctctgcccttacgacctaatcaccttccaaaggcccctcgtaccatgaccgtgggggttaggattttaacatatgaattttgcggcgggggcagggagggaacacggacattcatattaaagcaagagccaaaccaagactcatcctttgctaattcatcgtgattcttccccactcctgttttctccttctgcccttcagggatgcatgaggaatgtgtctttcctttcacctacaagggatctgtttacttcacttgcacccatattcatagcttatccccttggtgtgccaccagagccgtgtacaacggccagtggaagtactgccagagtgaaggtgagtggtatcacattgtccctgccagtggcctttgaatagggtggatcacaaaagagaatgtgtgactgtctatgacatgatcacatttttgcagacaaacggtaatacgtatgcgtgcgtagaaaaggctctgggttttaatgatcgccattctaacttgtgtgagaacacatggacacaggaaggggaacatcacacaccggggactgttgtggggtggggggcggggggagggatagcattaggagatatacctaatgctaaagacgagttaatgggtgcagcacaccagcatggcacatgtatacatatgtaacaaacctgcacattgtgcacatgtaccctaaaacttaaattataataataataaaatttaaaaaaatcagtgataatgtaatgggtaataaatgatatataattactgtttttaatttccacaaataaaaaaaaaagaaaaagaaaaggctctgggatgcctgacaatgaatgctaataatgggtaataatgttaataatgctagtgttaaaaatagtgctctctggatgagggtcttgtgatactgtaagactagttgacccaatagaaccatcccatctttatgcctttcttaattttctaagttaataaggaaaaaggaaacgaagtgtaagaaacgggatttgaggctgggcgaggtggctcatgcctgtaatcccagcaaaacttaactactaatagcctgctattgacgagacggcttaccagtaacataaactgtcaattaacacatatgttttatgtcttatgtattatataccgtatctcataataaaggaaactagagaaaagaaaatgttaataagaaaatggtaaaaaggaggaaatatgtttgctatccattaagtgggaatggatcagcataaaggtcattagcatcatcttcatgttgaggaggaggaggaagaggaagggttggtctcaccatcttgggatgacagaggcagaagcaatggaggaggtggaaggggaggcaggagagacagacacattca[144 bp omitted]tctactaaaaattaaaaaaaattagctgggtgtggtggcaggcatctgtaatcccagctactcgggaggctgaggcaggagaattgcttgaacccaagaggcagaggttgcagtgagccaagatctcgctattgcactctaatctgggcaacagagtgagactctgtctcgaaaaaaagaaaagaaaagaaaagaaactcacatataagtggacccgagttcaaacttgtgttgttcaagaatcagatgtatatggcataggcaaatgcttgatgaaataatgcataaagtctcttctgaaccttatgtctgtcctgtcctatgatggttgattgatgattaaatgactctgtcctgtgaacgactagaggaagttaagacactcacgaactctgttcctaacagattacccacgctgtatcttccctttcatctatcgaggaaaggcttataacagctgcatctcccagggcagcttcttaggcagtctgtggtgctcagtcacctctgtcttcgatgagaaacagcagtggaaattctgtgaaacgaatggtgagcccctgtagcagggatgggatgtgtggtgggagggagagtggacagcatggatcctcctgaggggaggctgggcaaggtagagaccagagcacccagggggaagtacttacaggagccaagtgtctgctcagagagttcgctatgacaacgacagacaggggtatcccgaggccattcgcccagtccccagtccagcatgaaaagacaggagtcctgagaactgaaacaatgagctgaagtcctgatattggcttctgagtatttctgtttctagaactgacaatagtgagattcacccactgatggacccaaactgccttttctttccttccttccttccttgcttccttccttcctttcctttctttcctttcctccctcccttcctccctccctcccttttctctttcttttctttccttctttctttctttctttctttctttctttctttctttctttctttctttctttctttctttcttccttccttccttccttccttccttccttccttccttcctcccttcatctctctctttctttctttttctctttctttcttctgttttttacagggtcttgctctgtcactcaggctggagtgcagtggaatgatctcaggtcactgcaacctctgcctcccaggttcaaaggattctcctgcctcagcctcctgagtagctgggattgcaggcgcccaccaccacacccagctaatttttgtatttttagcaggcacggggtttcaccatgttggccaggctggtcttgaactcctggtctcaggtgatccatccgcctcggcctcccaaaatgctaggattacaggcatgaggcactgtgcctggccctgacctgcatttcaatgcagcctaacatcatattaagtctacacataatcttaggtgaataatgaccaaaattcattgaatgtcctctctgtcctacactgatccaagagctttgtatacaatatcctgttgaatctttccatagcagctctatgagctgctgctcgccaccacctgttcaataaatggtcccagtataactgagcccttcccaaggtcacagtcctacactatattagaattagagcttgagttctagtccatatagttccaaagcccatgctctctccttaagcattgttgcgtccacagagacaaagatgtgtgaaggcagttattcgtaggcatgcttactcttgcgtaaaaatcttaattctgttgttcccttagcactcaacaaatcctaattccatctaaaccttaattttattctagccctaatcatccaccatttgtgttctttactataaacaaaacttaaccttaaatctcactatagctttgtcctagtagttaacctaatctttcatcccaagtccaactctttctccatttccattcctaactctaaattgtatcattaatacatacattccatcattaataaatacattaataatatactctgtcattaatacatcattaattcataaccttagccatttcttaaccctaaaccaaatagatgaattaggaaaggtatcagtgagaccaggctcagtggctcatgcctgtaatcccaaaagggattgggaggctgaggcaggagaattgcctgaggccaggaatttgagaccagcctaggcaacataggaagacccgctctgtaaaaacaagaattaaaaaattaactgatcatggtggtgcgtgcctgtagtcccagctacttggggaggctgaggtgggaggattccttgagcccaggagtttgaggctgcagtgagctatgatcacatcatggcattccagcctgggcaacagagtgagatcttgtctcaaaaaaaaaaaaaaaaaaaaaaaaggaggaaaagaaacatcacttttgtggtaatataaccttaatatctaagctcctgtttatccttaaaactatccaatctccttagacccagttttgatggagtaacagattcaaatttgcataaatcaccaaacggatgtccaagaagagataccttttagctttggcttccccattaggttaagaaagttgttgattatttcctttctatggataagtgagaaccaagaccacccatggctgcatgctactgtctccatgaacatagctttaccgcttcacagtcatcatcaacttgactctactaacccaggaaattcgtgcctgggaagtcacttttattatctgcaaaatgagaatgctaaggctggcatcacagggtttttgtaaagactggagtttattttcatgcaggattgatggtgatgccataccaggtacccaagaaatgtgagctttcttctgctatcatctgagacactaggcaaaaaaatgggctttgaagttagacccgagttggaattctgttgtttcccttaccatctatgtgatcttggacacattagatcatagaagtaataattatcataacataatgaacttttaataagcattttctatgtgccaggcagtattttaagtgcttcacatgaaataactcatctattccatacaataatctctatcaggtaaatgtgattattagcccagttttacacatggacaaactgaggttaatagaagcaaagctgtgattttgatcccaggaagtctaaccttcagaatttgtgctcttaatcaccagtcattactgcctgaaaaccccaaccccttagtcaaattctagctccccatgaaagaccaccaaaggaaattaaaaaaaaaagcctgctaattaggcaagactgagtttattgctcacttccttgacagcatcttaataacgtcttgggctgggcgtggtggctcatgcctgtaatcccagcactgtgggaggccgaggcaggtgaatcacctgaggtcaggagttcaagacctgcctggccaacatggtgaaaccccttctctaataaaaatagaaaaattagcgacgcatggtggtgcatgcctgtaatctcagctactcgggaggctgaggcagaagaatctcttgaacccgggaagtggaggttgcagtgagccgagatcgtaccactgcactccagcctggttgacagagaaagactccatctaaaaaaataaaaaataacgtctcgaagtggggagggaaaactcagcatattgatggggtcttggagtctcgtctaaggtgggtctttcaatgggggatgtgatttggattgtgtaaggatcatgatataatagttaggattggtgttcacagcaaggtgaaatgaccaaagatggggttttaaagagtctaggagagtaaatagtgttttgacacaatcgatatttatgtaactagcttttctggaggcttctggaatgaataatagggctattcgcaactcttatcttcctgggcaagaatttcctagcttagtagagtcaaggtgatggcgaccgcagaaccgtgaagtcgtgttaatagagacagtaagctgtgcacgagttgatagttttggttctcacttatccgtaacattgggataataacgtcatccggaagttgcttggagaatccaatgtgacgttgcctttaatgggataaagcgtggcacagtttgtgtgtcataaatggaagctcttttcatctcctcttcttgacccgtaacctttccataatccttttcagagtatgggggaaattctctcaggaagccctgcatcttcccctccatctacagaaataatgtggtctctgattgcatggaggatgaaagcaacaagctctggtgcccaaccacagagaacatggataaggatggaaagtggagtttctgtgccgacaccagtaatctggggatgggggttgggtgggtgtgggtggagtctttctttcatttgctcaacaaacacctcctgaaaccccactgtgagccaggcactgagttgggcactgaggatctggtgatgaatccggcagacagagttctggctcacgaataatgtcaatgatgtgatatgccacaggctttaaaatccaagagaaaggtgccaaaatgaaatgctcaaaatgttaaacacctaaccatgatgcaaatacagagtaaacacacgccagggtttttaaaaaccccagtgtgagccacgaatggtggctcacgcctataatcccagaactttgggaggctgagatgggaggatcacttgagcctgggaggttgaggctgcagtgagctgtgatcacacctctgtactccagcctgggtgacagagtgagaccttgcgtctaaaataaataaataagcaaacagtgaaatcacccaacaaaaggctcaaacatttggaaaacataatactatactgctaaagtgcacctgttcacagtacaagagctgaagtgagccaaaagagcatccccttgttcccccttgggtgagaacatgtgtgttgggagactcagactcaaatttcctctcctgtgtgtgtccacaaatgaccacagaagcgtcatgagtgtcgatttcatcagtgacaaagtttagcgagttgacgcatttgcacctgtggaatccatgaaagatgaggacactggaattagtcctctgagacaaatcctccatccaccaggtgctcctggtgaccagcattctccttctccctccttcctccagggccctctgtgcttccactctgcccttcttccctattccagtgcctgccctatcttccagcctttctcatgtcctacactcttgatagcttctgagggaagaaaatacccaagacccagtggaaaggaaagggaagtccttgggcaaagaggaactagaaggagttatatttctgcgccactccgggcaaggggtcagtccgaatagctgtgggtgggggggtgtgttgttccaacaacttgggactttcctaaataaaataaattatttctcagctggtcatgggagatgtgacagcaaaaattgagacccatttaccctctgttgcctcaagctgctgtggatagaggcttccagtttgtactatttatggggtcatctttcatgaggacatcatttacgtcctcatctttcatggattccacaggtgcaaatgtgcctactcgctaaactttgtcactcagaaaattgatacttgtggtgcttctgtggtcatttgtggacacacacagagttaggaagtttgagtttgagtctcccaacactcatgttctcagccaagggggaacaagggggtgctctttcggctcatttcagctcttgtactgtgaacaaaattcttctttggcttaggtttaggtcggcattctgagcagtgcccaggcagtgtcttcatgtgtagggtttacccagattttattttttagtttttttttttttttactttttatattttgttttattttattttatttttgagacggaatctcactctgtcgcccaggctggagtgcagtggcgtgatctcggctcactgcaacctccgcctcctgggttcaagcgattcttctgcctcagcctcccaagtagctgggattacaggcgcttggcaccacacctagctaatttttgtatatatgtatttttttagtagagatggggtttcaccacgttggccaggctggtctcaaactcctgacctcaagtcatctgcctgcctcagcctcccaaagtgttgggattacaggcatgagccacaaagcgcagccacattttatattttagagaccggatctccatctgtcacctaggctacagtgcagtggtgcaatcatggctcaatgccgcctcgacctcccaggctccagcaatcctcctgcctcaacctcccgagtagctgggactacaggcatacaccacacccaactaattaaaaaaattttttttgtagggacggggtttcactatgttgcccaggctggtattgaactcctggcttcacatgatcctcctggctcagcctcacaactgagctgggattaaatgcgcgcgattaaatgctgggattaaaggcgcgaaccaccacactcagccccaatttgaaatctagggtgggcctgaagcccacgcctctacgacagtgtgaagcctgaggagtaacctttgttttatccccttctgcttcctaggaatttccgcgttggtccctggctttccttgtcactttccgttcaactataaaaacaagaattattttaactgcactaacgaaggatcaaaggagaaccttgtgtggtgtgcaacttcttacaactacgaccaagaccacacctgggtgtattgctgatgctgaggtgagagcagggaccaacagtggtcatttcacggatgcagaggtgagacaggtgcacaactggtgtgtcactgatgcgaaggcgagatctgctttttcaagcgtgtctgattagcgtcgctgatgtgaaggcgagatctgttgcttttccagcatgtctgattagctgaggttcccagcaatgcgggctcctgttgtcaaagataaggtggagttggggaagactggaacaactccccagattagaaggatgaaagaaattgggatttcccccagaagcaggagagcagagggggattggcaaactttttcagacccaggaaggtatcattccaagtttcaagtctgggaggctttggctgttgatgattagaaaagtggaatttctcaaagtggagcatggtatgaaaaaacaacccagaaaaggggataactgaccagctgtggtgactcacacctgtaatcctagtgctttgggaggccaaggcaggaggatcagttgaggccaggagtttgagaccaccctgggcaatgtagcaagaccctgtctctacaaaaaaaaaaaaaattagttgggtgtgatagcacacatctgtagtcccagctactcaggaggctgaggtcagaggatcccttgaactcaggagttgcagtgagctatgattacaccactgtaccccagcctggggaacagagtgagaccttgtctaagaaagaaaaagagaaagatggacgaaaggaaggaaagaaggaagaaagatgaaggaaggaaggaaagagagagggaggaaaagagagaggaagggaagaaaggagggagggagggaaggaaggaggaagggagggaagaaagaacggaggggaaaggaaggaaggagggaaggaaggagggagggaaggaagaaagaggaaagaaaggaggtagagagagggaggaaagaagaaaggagggaggaaaggaaggaaggagagaagaaaggaaggagagagggaaagaaggaagggagggaggaaggaaagaaggaagggaggaaggaagagaggaaaggagggaggagggagggaggaagtgagggaggagggagggagggaaggaggaagggagaaagtaggaaagggaggagggaaggaatggaggaagggaggagggaagggagggagggaaggaaaagaggaaggaaataaggaaggaagggaggaaggaaagaaggaagaaaagggaagggaaaggaagggaaggaagggagggaggaaggaaggaagggagggagggagggaagaaagggaaggagggaaggaagcaaggaaaggaaggataacccagaagccaagacaccatggtgtgcatccattgcccccatcactgagtagctgaccaagggaaaaatggggtttatttctcttccttcaccatttgggcctcctgccccacctcagcccgctggtcatcaagtacctccacagaaccaactttatccctcttttctttttttcttttttctttcttctttctttatttttttctttttctttattttatttatttattttttttgagacggggtctcactctgtcgcccaggctggagtgcagtggtgcaatctcagctcactgcagcctctgcctcctgggttcaagaaattctcccacctcagcctcctga[221 bp omitted]acattcttcacaaaggaccagctgattgaagcaggtggtgcagagggtatttctaaaggtggttatttaagcttgaaagatgttctccagcctgtagaaatggtctctaaatctcccgcatggatcaactgacctcactgctctgtgacttctggaatctaaataaaaaaagagaagccctttcatcagatgtgtagacaaaaccccatccctcctccctttggggtggaaaaccctggtggttctagcaatgtctgtccttacaatgcatgtggcttatggatgacactaaattagcgggcccttcctgaattttgccttggtaatgaaaatcatcttcctggaatagaggagagggaaaggagggggtttggaactctgggcaccatcttaacagggtagatattaaaaaacacccacagtggcgttcagtctgtggctaggactaggaacagcgtccagcctctgacttctgtccatcacagcagaactggcactttgcaggtccccttccccttagcatagaggtgagattgaggagctcattgttcattgatctccttgctcctatgagctaggcagggatgtgggggtgggggcgtctgattcctctcagctcagctgcttccgactaagtctggaaaaccaatacaaagtcatttttaattcaccttcctctttgagtcaatgcctacttattcattaaactcagatctttgcttctattttcaaggaaaggagaaatatcttcagaggaagactgccgccatactgaggctgagcacagatttgtctttttcattgcatctgtcaagcttaaataaccacctttagaaataccctctgcaccacctgcttcaatcagctggtcctttgtgaagaacgtagagagaatgcggcataaccaccaataaaggagtcttgatttaaccctgggatctgccttttctgcttcctaagatgagaccgatggtgaatgtgtggggaaggaaagattggtagccaggctgtcgagtctcatagtgtggagaggtcagactctcaggccagggacctctaggagtcattacagcctgctctgtcttctgagggaaatcacagatttgggtggggtgtttgtagatacatattaaattattaatgaataaattaggaagtaaacagagggtagaaaattcaccacaagactgcctcaaccattccctccctgtgcccatggcagatatcaagaactgattacagaatctgattccctctcagcccagatggaaattcacattgttgttcttgttctttcttcttcttcctttcactcttcttctccctctcctcctcctccatcttctcctccttctcctccatgtctcctcttactcctctcctactccctcttgtcctccttcttctactcctccctcttctcctcctccctctccacctccttctcctcctccctctccttctcctcctccttctcctcctccctctccttctccttttccctcttcacctcctccttctcctcctccctctccttctccctctcctcctcctccccccgcctccgtgtcttccttgtgctggaattctcttaccccttgtcttcctgcagtctcctcctcccttcactcattgtccgtggaattgcccctgtgatggagatagacgtgggcttcctagatcccccttcaagaaaggacttgctgcccagctccagtgagtgctgtctgcaggcagcctttggtgttcagcccaaatcagagatggtctcagcttcaaaatggcctccctcgcccaaaccatgcccttcccagggtaggccacaactaacgaatgaccaatgctgggtttaaaggcctggctattccagtccaagtgagataactcaaaaagagctacatccagagctcccgtctgttccgctgaggttgtagagcctgcaccgtggctcaacctctccctctgtccaatcccagttccttcccttcccttccataactgatcccaaggaaactccctgataagcctcctgcctgctgtctctgctcttggacagaggaggagccctggggaacccaacctgagacagctcatctttaagagatgcccattctggcagggcatggtgactcatgcctgtaaccccagcactttgggaggccaaggcaggaggatcactggaggccaggagtttgagaccagcttgggcaacatagcaacactctatctccacaaaaaaatacaaaaatcagctgggtttggtggctcacacctgtagttccagctacttgggagactaaggcaggaggattgctttagtccaggagtttgaggctgcagtgagctgtgattgcaccactgcactccagcctgggtgacagagcaagactctgtctgaagaaaaaaatagagagatgtcccttctgaccactctgattaagccccttccccaaattatctttgtatccaaccatcccaatttatcctcaaagtatttgtcccaatctgagctgcttctgatggatttaattttttactcccctggcactggaatgtagcctgcaagaaaccaaaagaccttattgctgggcacattccaggacctagaataatcccaggcatataacatgaaattgtgatgtccaatatagtagccactagccataaggagctagttacatttaacttaagtaattaataacattccttaccgatatggtttggctatgtccccaaccaaatctcatcttgaatgatagctcccacaattctcattccatctacacattcacccatcttccccttcatttcttcagtcacccattcaaaaaagattttctaagtacctggtctatgcctggcattgttccaggtaatggaaatagagcaaggacaaggtatttggcctcaacaagcttatattttgaaacatgcaattcaatagaatcttctgcgaggatggaaatatggtttggccatgtccccacccaaatctcatcttgaattgtagctcccataattcccatgttacctattgatgtggtttggctgtgtccccacccaaatctcatcttgaatcatagctcccgtaattcccacatgttgtgggagaaacctggtggaagataatggaattatgggggaagtttccttcatactgttctcatggtagtgaataagtctcacaagagctgatggttttatagggggaaacccctttctcttggctcttattctatcttgcctgctgctgtgtaagacgtgcctttcaccttccgccatgattgtgaggcctccccagccacgtggaactgtgaggccattatacctttttttctttttctttttctttttttttttttttgagatggagttttgctctttcactcaggctggagtgaagtggcatgatctcggctcactgcaacctccaccccctcaagttcaagtgattctcctgcctcagcctcctgagtagctgggattacaggcatgcaccaccacacccggctaatttttttatttttagtagagatagggtttcaccatgttgatcaggttggtcttgacctcctgacctgagatgatccacccacctcggcctctgaaagtgctaggattacaagcatgagccaccatgcctggcctctttttctttataaattatccagtctcgggtatgtctttatcagcatcatgaaaacagactaatgcacttatgtattcattaataaaactgttctcacttgataaaaataaaataaaatttagtttctcagccttgctcacacatttaatactcagtagtcacatgtggctaccataataaacagcgcgggtctggaatatttctatcctcgcagaagattctattgaattgcatggttctaaaatatgagactgttgaggccaaataccttgtccttgctctatttccattacctgaaacaatgtcaggcatagaccaggtacttagaaaatcttttttgaatgggtgactgaagaaatgaaggggcggatgggtgcatgtgtggatggaatgggatggagctgaggaaagagcttgagattaggaaataacattattctgcttccactttttcttttttagagacagggactcactctgtcacccaggctgagtgcagggtgccatcttggttcactgtaaccttgacttctgagttcaagctttcctcctgcctcagtctcttgagtagctgggatcacaggcacacactgccatgcctggctattttttttttcttttctttctttctttttttttttttttttttttgtagagatagggtctcatgttgccaggctggttgtgaactcccagcctcaagtgaccctccctcctcggcttccccaagggctccactttttcttaatttttttattttataaaacaaagctattggctgggtgtggtggctcacacctgtaatctcagcactttgggggagctgaaaagggtggatagcttgagcccaggagtttgcaaccagcctgggcaacatggcaaaaccctgtctttacaaaaaaaaaaatacaaaaattaaccaggcatggtggcatgcacctatggtcccagctgaggagggtgaggctgaggtgggtggatggcttgagcccgggaggtagacgttgcagtgaggtgagatcactccagcctggacaacagagtgagaccctgtctcaaaaataaatacataaataggctgggtgcagtggctcacgtctgtaatcttagcactttgggaggctgaggcaggcagatcacatgaggtcagttcaagacagcctggccaacatggtgaaaccccatctctacttaaaaaaaaaaaaaaattagctaggcatagtggcacacgagtgcacgcctgtaatcccagctactctggaggctgaggcgtaagaatcgcttgaacccagaaggcggaggttgcagtgagccgaattcgcgccactgcactccagtctgggtgacagagtgagactctgtctcaaaaataaataaataaatgcatgcatacatacataatacataaatacaaaaataaaataaaataaaataaaacaaagctattgaaccagatgactcattttaaacatctaattcatggacttcaaagcaagaaaaagttggaggaaggcatgaagttaattctttattttgacttttattttaacctttgcattgctggagtgtcttgctttgggcggaggtcaggaggaatctctcttttctgtttcatggcacagatcgatgtcaggacgtgagggacggaacagacgacccatctaacagagacacagcctctgggtggtccaggacagaccagcgcggaggtaggaggcttctaggaaagactttgcaacaacctggctgaactggggatttgggggatcctgtcatctctctctttgcatgatgacattttttcaggggattaattccccaaggatcagctagctctaaaccttgataatccagatttgtggtttaattcagtcccctgagtatcttacacaaaggaagggatgtgggaggggagacagagacagacagacagagagagagagagagagagagagagagagagagagagaaaccagacagtgcttccaggaaatcaggaaaaggaaggagttgactttgaatgccacttgcacgagccatttccaagcccagcctcaacaacaactctgtttccagctctgtgactgatttgcatcctttttatttcattttgtatttctatagatttagggagtacaagtgcggttttgttacatggatatattgcgtagtggtgaagtctgggctgttcatgtaaccatcacctgaataaagtataatttgtccccttaccgggagagagaaacgggatttgcaacagttgatgcaggcaggggaagagtagagactacgttctgaaccttttgatacccaacaggagaagagactattttcacccaaggggaagctggggaagagactctggcaggtcacagggacttaggactacgtgaagtgaaaagatgtcaagaatcattggaatttttgggggtggcaactggaccctcccacgcttcctatttccatccacagactcttccttcttaatctagttctgcagacgcccccatcctggcaaagataccgctctgggtctcaccccatgcacagcgccgcatgccaatgccctccctcccgcctgccctccctctctgctttaaggggatctggggcttttgggctttggttctccacaagcgcttgctccatgttgaccaggtggagagggtctggagcttccaggacctcctcagcgagacatcatcttcacaaactctgcaaagaaaaaaaaaaatccccagtaaggcatctcgttgtaaaagcccccaacattattttttgagcccttcctatgtggcaggcactgctggtgatccctgggaaattacttaatccctctatgcttccatttctccatctatgaaatgggaatcagatctctgtggcaagttacttaaccctgtgcctcagtttctcatctgtcaagttggcatgtttaatagatctacctcatgaggttgagataaaattggcttacaggctgggctcggtggctcacgcctgtaatcccagaactttgggaggccgaggtgggcagatcgcttgagcccaggagttcgagaccagcctgggcaacatagcgacacccccaactctacaaaaaaattaaaaaattaaataggtaaataaaatttgctcagaaccgtgcctgccatcacagtcaccccatgtaaactactgtggttattattatgctcctacttctgaaagactaatttcagtatgttgcagtttcttcatttctgttatgaaaataatcttgcatgtaaataaaacattaaatttaaaaaatgggaatcctagtattgctatttccttatatggtttttaagaccattaatggcataatgctcacaaaacagattaagtatcccataaacagctattgttggccgggcgcggtggctcataactgtaatcccagcactttgggacgtca[134 bp omitted]gaggcaggagaattgcttgaacccaggaggtggaggttgcagtgagccaaggttgcaccactgtagtgcagcctgggtgacggagtgagactccatctaaaaaacaaaacccaaaaaacctgtgattgtcactatgagatttcatcatctcaaccatcctggagggataagtgtcactttacagataaggaaacttacgccagcgagggtcaccaacatacctgaggccacgtggatagtgaatggtgaaccctggaaggaatgcaggttgcacctgactttgctgtggctcaagacgatcttgctgcccacccgggtcttgaggtcatcctgaccttcccttgcctttggttggcctgaggatcatctcccacccccaccccaccttctccagatgtcacttgatgtccactgcacacctaatcctggctagatctagcaggtgtccaaccagcctctactgtgtttccatactgggacatacagcatatatggtttagagaatggcccttcctcctctctatctaggatggaggccttggaagctaatacaactcaacacagcaaggtctgctgtgataacttccatggagaggaacagaaaaacttctgtaagacttcacagctgggaggaagacatgagggaaggatggagagaagcttcctgacaaaggttgccttgatgtgagttcctgagggatggatgagactgaaagatgtggtaagtggacggagcatctgatgcctaggaacggaggttggagaacataaagcaggcaccaagtttgtgccagaacttaaaagttcagagaatagctacagaagatacaggctgggtgggtgggcgaggccagatgatggatagacttgcatatcagacaaataattttggactttttttttttttttctggagacggagtctcgctctgtcacccaggctggagtgcagtggggcgatctcactgcaacctccgcctcccaagttcaagcaattctcctgcctcagcctcccaagtagctgggactacaggcacatgccaccacccctggctaactttttgtatttcagtagagatgggtttcacggtgttgcccagtctggtcttgaactcctgagctcaggcaatctgcctgccttagcttcacaaagtgctaggattacaggtgtgagccacgcgcctggcctttttttctttttttctttttttgagatggagtctcactgttgcccgggctggagtgcagtggtgtgacctcggctcactgcagcctccacctcctgggttcaagcaattctcctgcctcagcccccgtatagcctgggactacaggcgtgcactgtcactcctagctaatttgtatatttttagtagagatggggtttcaccacgttggcccccctggtctcgaactcctgacctcaggtgatccgccaaccttggcttcccaaagtgctgaaattacaggcatgagccactgagcccggccagaattttggatttttgtccataagcagcagataggtgctgagatctttgaaccaaagaatgtcacaattagaacttgacatgcttttttttttttttttttggacggagtgttgctctggagtgcaatggcgcgatctcagctcactgcaacctccgcccccagcgttctagcaattctcctgtctcagcctcccaagtagctgggattacaggcacctgccaccacttccggctaatttttttgtattcgtagtagagacaggattt[144 bp omitted]tctcatccatgtagaaccccaatccttttcacttattcagtgatccaatatactcatgctgggctcagtgctaggatttggggatatagtgatgatgaaggaattggtccatggtctcagaaggaaataggcaataaactctagagatgccacgaatccgtattactgcagaagcaagcgggaggtattactggggagccagcagagggacacggagcccagtaagagaggtgggaggtaccttccaggaacataactaggagttagccaggggagaggggaaagggtattccagacggaaggacaacttgagcaaagacagggaaggaaaatttaaaaatacagtggtgctttgtgcatgatttcttttagttttctccaaaaggtgtcatcatccacctcattttacagatgggaaaactgacccttaaagagaaaaagggagtagcataagccacatgctgagtcagcgatgatcctgaatttgaagcccctgaacctgaccccagagctccagctgctagccagtccagtctctttctgatgggacaagttcttcctaggataaaaggtgccctgcaaactaacaaggaatgggcaaggcggaagggcgtcctgagcatgggaaggaaagggccttggctgaggtgttcctcggagccaccagaagtgagcgacacccagctctttgaaatgaatagcctgggaagaaagggacagaacaaatgcttccaaaacctgccacccgcttccattctcaaacttggagaggagtgagaaggagtggccaacttggaaaatctgacagtgagttggaagtggattcctgcggtggctgcccccgctccccaccacgccccgtcaatgtcaccttcaaagtcaactgtgccgtctccattaacatcagcctcccggacaacctcagagatctcccggggggtgagccgctcccccaggagtctctgcatggcctgctgtagctccaccagggtgatctccccatctccattcgtgtcaaactgaatagaagcagaaatagattatatcagcaatgacaatgatgatagccacgagatgatggagtttacctatcgcttactgtgggtcaagcactgagataaaagctttgggaatgtgagccactagaacgtcagctccaaaagacagttttgttctgtttttttttttctttttttctttctttttttttttttttttatttgagacagtctcaccctgtcacccaggctgaagtgcagtggtgcaatctcagctcactgcagccttcacctcctggattcaagcgattctcgtccctcagcctcccgagtagctgggattacaggcgcgcaccaccaaacctgtttaatatttgtatttttagtagagacagggtttcaccatgttggccaggctgatcttgaactcctgacctcagttgatccacctgcctcagcctcctaaagtgctgagattacaggcttgagccactgtgcccggccgaaacttttttttaatgagacggggtctcactattttggccaggttggtcttaaaatcttggccttaagcaacccttccaccttgtccttccaaagtgctaggcttacagtcctgagccaaagtgcccagcgatacatttaaaacttactttttaggtgatttttgaaacatacattattatttactatagttatcctgctgtgcaatagatctcaaaagttattcctcctgtctaaccaaaactttgtaccctttgacaagcaactgtccattccttctctgtggctccccagcctctgctaaccacctttctttttatttgcatgagttcaattttttaagattctgcatgtaacatcatgtggtatttgtccttttgtgcctggcttatatagcttagaataatgtgcttcatgtttattcatgttgttgtaaatgatagagtttccttctttttaaaagctgaatatgccggactcagtggctcatgcctgtaatcccagcactttgggaggccaaggcgggtggatcacctgaggtcaggagttcgagaccagcctgaccaacatggagaaactccgtctttactaaaaatacaaaattagccaggcgtggtggcgcatgcctgtagtcccggctactcgagaggctgaggcaggagaatcgcttgaacctgggaggtggaggttgtggtgagccaagattgtgccattctactccagcctgggcaacaagagcaaaactgtctcaaaaaaagagaaagaaaattttaaatgacccatgctgcttacattgtatttattttggatgacacagctgtaggctgaggaagctgcaagttaacaagtgccgtaaggcaggaaggtgtacttgaggaagaggcagaagtggggagtgtttagggaggcgtgagctggggagaaatgagcatgaaatagacaaggtctcagtgttgcagaaggcagggcccaagtacgtaggggcttgtgtgtcatgggacgttgtcaggatttggttctgagtaagacaagaagccactggagaattttaagcaggggagtgaccagatctgatatacattttaaaagaatgtgagcatgaaaccctgttgtgtagagaacagaccacagtaggaccacgatgggagccaggaaaccaattagagggccgccatgatcatcctggtaggagatggttgtggtttgagccagttagcaccagcagagctcaagaaggagagttcactccccgatgttttggaaattgaacgtactagactttctggtagactagttaagggtgtgcagggcagagctttggaggcagttcattaattcaacacatatgtatccatattgctaaaaaaaaatgtgtcagtagtgcccatgtggaaggcaccgttcttgggactgagcacggagcagcaagcaagacacttagaaatacttgtcttctgtacctggcttatttcacccagcatactgtcctccaggttcatttgtgttgttgtgtggggcaggatttccttcttttgtaaggctgaatattgcatttaaatatataccacgcagaaggagaaatactgcatgattccacttacatatgaagtacttaaaataaccacactcatagaagcagagagtagaaggatagttgctgggggttaggaggacagggaaatggggagatattgtaccatgggtataaagtttcagttacgcaagataggttctagagatctgctgtgtggcattgtgcctataattaataatactgcataatgacaaatattgcttttaatggcaaaatcacaattacttttgcatcaatctaataactatgggcaaaagacgtgaacagccatctctctaaagaggacaaatgggcaaaagacgtgaacagccatctctctaaagaagacaaatgggcaaaagacgtgaacagctatctctctaaagaagacagacaaatggcaaacaagttcgtgaaaaaaatgctcagcatcactaatcatttgggaaatttaaattaaaaccacaatgaaatatcacctcacatctgttaggatggctactgttaaaaagatgaataataacaagtgttggtgaggatgtggataaaagggaaccctggtacacttttgctgggtatggaaattagcacagctattatggaaaatggtatggaggttccttagaaaattaaacctagagctgccatatgacccagcaataccacttctgggtatgtatctaaagtaattgaaatcagtatatcaaagggatgtttgcactcccctgctcatggcagcactattcacaatagccaaggtatggaagcaacctgtgtccatcaaaacagaagagtggataaagaaaacatggcataagtacacaatggaatactattcagcttttttttttttttttttttttttttgaggtggagtttcgctctttttacccaggctggagtgcagtggtgcgatcttggctcactgcaacctctgcctcccgggttcaagcgattcttctgcctcagcctcctgagtacttgggattacacgcatgtaccaccacgcctagctaattttgtatttttagtagagacggggtttctccatgttggtcaggctggtctcaaactcccgacctcaggtgatccacccacctcagcctcccaaagtgctgggattacaggcatgagccactgcacctggccttaaaattttctagtagtgacgtttaaaaaaatgttaaaaggaacaaatgaaactaatttttaatattctcttttatttgacacaatatatctaaagtgttatcctttcatcatgtaatccacttaaaaattattaatttagctatgtaagtagcattctttttatacacactggatttcataaggcagtaagttctaagttcttagtaggtgcttagcatgcttaattaggatacttagcctagaagtttacttaagtatacaagtacgttatgctaattatattagcatactaagtcttaatacagtgttcacgttacacttacagcacttctcaatccagacaactttttctttttgttttgagatggagtttcactcttataacccaggctggaatgcaatggtgcgatctcagctcactgcaacctctgcctcccaggttcaagcaattccctgcctcagcctcccaagtagctgggattacaggcgcccaccaccatgtctggctaaatttttttgcatttttagtagagacggggtttcagcatcttggccaggctggtcttaaagtcctgaccttgtgatccacctgcatcggcctcccaaagtgctgggattatgggtgtgagccactgagcccggccagctgtagatctttataagaagctgggggaggcacttgcacagccaataggtggaggcctcctaggatttgaacccatgtttgcctggttccaaatcctttgctcccaaacactctactactctttattttcaccttgtgttgctgaaagctctcagaacgagaaggtattttatcaggggatataagcaagtctgttattctcactgggtctgatattttttagtatgtctgcagcaagtggttcgtaccagatgaccactttgcattcccttctgggatctcaaattcttggattcttcctgttacaggcactaagaatagaggccctggccaggcacggtggctcatgcctgtaatcccagcactttgggagaccgaggcaggtggatcacttgaggtcaggagttcgagaccagcctggtcaacatggtgaaaccccgtctctacgaaaaatacaaaaattagctgggtgtggtatcgcgcacctgtaatcccagttacttaggaggctgagacaggagactggcttgaacccgggaggcagaggttgtagtgagccgagattgcaccattgcactccagcctggggacaacagtgaaaccccgtctcaaaaaaaaaaagtcctaacatttattctagagatggcaggatcttggataagatttataatcttcatgagcctcacttttctcatctgtttaattgggatacatgactgcttgcttactcctaatgtgtttgtgtgcgtgtttttgtttttgtttgtttgtttttttgaggattaaatcagataaagtatacagaggcattgatccattgcaggtgtttggaatacgttatttttcttccctatttattgatcccaccatggctggaaaaaaaaaggtgggggcctggttggtgggtgctgtccatggcattggctaattacaggcagacctcagagggtctgcctctaccatcaccagcaccatgacactgttaactcacctccttgaaggcatcccgcatctcctggacaccgatcatcccagctgtttctgcaagcaatttgggggtcatcagctccacaaagtcatcaaagtctacacggccacccactgaggaagatggcacaggattagcgagaccccacaagccctggccttccattacctcactttgtgcttcgagtcagttagatcagctcccttctccctgccctataagagccgtctttgacttcctccctccagcagctaactccaagctccaaactcatgtccctctagcctgaacaggagtggatagggtgtggtatggtggaagtaactgcctgtgtgactttcagacagttggttaagatgtttctcctcctctgtagacctgtacaaagaggagcatgaattaaatgagcatacaatttttttttcagatatgaatactatcattaccttgaa[136 bp omitted]aacctctgcctcccgggttcaagcgattctcgtaccttagcctcccgagtagctgggattacaggtgcacgccatcacgcctggctaattttttgtatttttagtagagacggggtgtcaccatgttgcccatgctgttcacaaacccctaacctcaggtgatctgcccacctcagcctcccagagtgctggaattacaggttacaggtgtgagacactgcgcccagcctcaataggaattttattctagctaaaatctaaaaatcagttatgatctccatccaaaaatccatccatcctttttgcagctgtattcaccaacattagctccagctccaagtttgtttccaacatccaatacagctccaatctcgtgctccactgatgaatcttagtggtgatagtaataactacctttaataagaatttactggaggctaagactttaactgcatcagcatctttatctcttccttctcttcctttccacagtcccatgaggtaaggagagaggcatcttcctctatagatgaggaaatggaaactgaagagtagcggataacttcacttttcaaaatgactgtaattagtaaataatagaactgagatttgaacccagacctatctctaaaagcttttaaccacttcaaatgctgccttcctgagtcgaatctgacctgttttcttccagacttctagtccctctcatcctcctctccacccccaactctactcttaacctctacatccttcccaattctgccctgatcccttccctaaccccggccatccctcccattccctggactcacggttcatgcggatttgctggccgagctcaatcagttccatctccgtgggcatgtaacccatcgtcctcatgagattccccagatccttacaagagatgaacccatctcggtccttatcgaactcaagaaatgcttcccgcagctctgaaagttaagagagaactttgggggaacttgaagcagtcagtggggaagagtggcatctcttgaagctatcaatgaggctccaactagagactccttaaaggagcgtacattagaaacaaaacaaaacaaaacaaaaaaaccaaggccggatgtggtggctcatggctgtaatcccagcactttgggaggtcgaggtgggtggatcacctgaggtgaggagtttgaggccagactgaccaacatggcagaaccccatctctactaaatacaaaaaaattagctgggcatggtggctcatgcctttgatcccagctactagggaggctgcctcagccaaggcagaagaatcgcttgaacctgggaggcggaggtagcagtgagaggagatcgtgccattgcactccagcctggcaacaagagcaaaactctgtctcaaaaaagaaaaaaaaattcaaaaaggagtgatgtatgaaatgtgttagcaaaagaggcatcattcctgagaccactaaatgagagcactggcgtccttcagattcctggatgaagttatggggaacctcaaagtcaccaagagagaaactcatttgttttcactcctgagtcttggagatacttgaggatggatatgccttcgaaatactttgggaagtccttcaactgccacgagaaagagttctacaaaattacagttgagtgggaagagagagggattgtaaaaattccatgtaatggaatttatacggaaatgcacaaagggactgagggcaggtcaggtgggtggatggcaacgtggaagcaactggggaagacggtgttaccttcaatctcatcttgtcccagtggtctttcctggaaaggaatgcagatgagagggaatttggagagagggtcacccattctccaaagggtctccttgttctcccaagctcctccccacgctctcgtggttctctttccattctctctctcctcctccatccctcccattccttttcccatctcctgactcctgttccacagttcttggctccccacccccctctcgatgtctctctcccacccacgaatcccaatctccctttttctccctttctgagacaaacacccatcacattgtgtcaaagggggtcttaaacactggggagtccaatctccagatgaaaaaagtgagacttcacaaccacagctaactcattcagagtggtgactctgtgccaggcagtttccacaatcatttcatttaaacctcagtactgctctgtgatgcagatctacatctcgtttccatcttacccatgagaaagctgaggaacagagaggttaaggaacctgcacaaggtcacacagctcacaagcagcagatcccctcccaagggaggaaggcattcacctgctccctggaggtcatggggcaagtcagacacagtattgggatttgaattcagggctcctgactcccaagtcagaattcttcacactagcccccattcactcctttctcacctgcctccaatcttcctgccaaaggttagaatctctgtgcatggaaacagcattcaatggctttcaggcaggagggtcagtgccagcatgaccagttcctaaacactctgagaatgtccagttattgctgccccacctactcctgcacatacctgaagggttgggcttacatatacatggcatgttaacaaggaaattctactgacctctggtctctttagccttcccatctccctttatccctggagcctttccctcagcttctctttcatctgatcccctccttgcggtcccttatcaccctttttttcattctctctctcttttttttttttgagacacagtctcgctctgtcacccaagctggagtgcagtggcacgaactcggctcactgcaacctctgcctcccgggttcaagcgattctcctgcctcagcctcccgagtagctgggattacaggcgcctgccactgcacccggctaatttttgtatttctaatagagacagggtttcaccatcttggccaggctggtcttgacctcctgacctcgtgatccacctgctttggcctcccaaagggctgggatcacaggcgtgagccactgcctggccttttttattctctttttttggtgatcttaaagcctaacaatgaaaagtatgcccacatatctggacaagttggtatatatggaaaaataaaaaaattttaaaaagcatgcccacaggaatcaagcaaacccgaccctgccacttacttttttttaacgagacaaagtctcactttgttgcccaggctggagtgcagtggcataatcagggctcactgcagcctccacttcctgggctcaagcgatcctcctgcctcagccacctgagtagctgggactgcagatgcatgccaccatgctgagctatttttttgtatttttagtagagatggggtcttgtgtttcccaggctggtctcaaactcctggacataagtgatcctcccgcctctgcctcccaagatgctgcgattcaggcatgagccactatacttggccgaccctgccacttactaactgtgtaagcttaaggcaaatgacttcatgactcagagcttcactttcctcacctgtaaaatgggaatgaaagtcactgacctcatgagttgttctgaggtgtaaataacatcaggtgtgcaaatccctttgcacagggctgggcacagaacaatgacttaataagtggcagctattgttattaacgtcatcattatcatcaccaccaccaccatcatcaccaccattatcacaatgagcatccatagaaaagaatgatggtaatctcaacaatgacatcatcccactttcccttttcatttttcttccttttctctccttctctttgctcctgacttttgattttacccccacccatttatctcactggcttacatgaccccaccagggtccttggaatttcttataccttctcagctcctgctctatccacctgttcccctggttctgtggcaccatcatgtccccttctttgtcccacacccctgctccctttgccccgcccaccgcccttccccctcactccccacctcacccgctgtttctcagcaatgcctttcctcaagaagatgcaggcggggcccatggggaactgcatggaggggtggggtggagctcgcagggcaccagtctcaagatggcccctcctccctgctccctgtcggagctcagcctccttatcttctccagcactcctttgccacctcttcctgcctctcttggcttctccttcggtcccggtgtcttagagctgtgacagctgggctggaaatctctacccgggttggggagggaccagagctgtccctgcctccccatctggcttgaatgatatgggtggggaaatgcagagtcaggttctgtgacgcctttatccccagagtggaattggaaagtgcattttataaatggggattagaggctggatgtggtgctcatgtctgtagtcccagcgctttgggaggctgaggtgggaggattgcttgagcccaggagtttgagaccagctgagcaacatacggagaggctgtctttacaaaaaataaaaaaattagccgtgcatggtggcacacacctgtagtcccagctgctccaaaggcagagatgggaggattgcttgagcccaggagttcaaggctgcagtgagctatgattgtaccattgcactccaggctgcagtgaactacgattgcaccattgtactccagcctggctgacatagtgagaccctgtctcgaaaaaaagaaaaaaaaagaaaaaaaagaaaagaaaatggaggattagagcagacggcatcatttattcaatgttccaacaagcatgtgaagggtcactccaacactggcctctgggcagtgagatggagagctcagcacccctggcctcagggagttttcctgggtgagtcgggaatgtgtgagagtgagcaggatgcaagcatggacttcaggaagtgggcgtacacggtgactaagagcatggcatttgctcttcctctgttcatctctttccttctgtctttcctgaatgatttagagggaaaaagcaaggtgggggtgtcagggagggtgtgaagttatggtggtgtcaaagcccaaaggggttttgcgactccacactaggtagggttaggggaggagggggctgggggccatctggcgtggagagccagcattccagtggggtagtggggtgaggagaagtccacatagaggggcagcatgacccagggtgttggggctggagatggtggggataaatccacagatgggcagcttggtgtgcagtgttggaacatgagctgagtggggcgggggcatttatatgcaggcattgtctggggtggaggtttgcactgtaaggcaattaggaaggaggccacatagaggggatctggcatgggttgtcataacccaagcagagagagaaatgtccactcatgggaatagcatggtgtatggtgttgaagccagactaggctgggaaagacatccccacaggggtgaaatggcaaaggaaaagggaaattggctacacacagtgagtaaggggaatgggggccaggtctcctactgttggaaaagggagttactaagacagaaaggaggaaagtcgaatgagccctgtggtgttggactataactggaggcgttggtatgtcctcatggatctcaattatacatagagagataaaaataaacacatagtttcagtgtgtataggaacatttgtacacatattctctagctctctccactaagagaacatagaaacaatgatggcccatatgaatgagcaccactagcatccaaatcttgacttctatataccattctccaccaaatggaaccagagtgcctaggaaatttggctgattccatgtctagagcaaaaaaagaacaagatgagcctacaaacgtcctatgcttaaagcaagaaattgctcaaagtgttgtgagaacatgtggaaagaacacaggagtctgcttgaagaagctccattggccatactgggcagtttgagagtcaaaataaataatgatagtaacaaattatacaggaccacagaagaaaccaggagtccatactcagataaataaaaagctaagtgagaagtttgatatttacagagctcaaaatacctccctacaaaataccaatttcaaaggagttacgttatagtggagaaacgtggcaaacaccatcttagtcaatgaaagtggacatcatcagtaatgtgacaagttggaatttcacaccacctgacaggatgtcacgagaacagcatcgcttctgtaagattcctgaatctcatcataatcagacgtcagacgaacccacatggagggatggtttacaaaataactggcctgtaagcttcaaaaatgtcaaggtcatgaaaatcaaggaaagattgaggaaccgttcgagattggaggagactaagaagacatggccgaggctgggcgcgatggctcacacctgtaatcccagcaatttgggaggctgaggt[132 bp omitted]gaggcagcagaatcgcttaaacccaggaggcggaggttgcagtgagcccaagatcgtgccattgcactccagcctgggcaacaagagcaaaactctgtccaaaaaaaaaaaaaaaaaaaaaaaaaagctacgactgaatgcaacacagaattctgaacaggatccttctgctatcaaggtcttctttcggatgactggtggtttgctggcaatagtttggcggcccttggtcagtagagcctcaccccaatccctgcttccatgttcacatggtttcctctctgtatacatgcctgtctctgtctttaaatcccccccccttttttaaaagaattttatttcaaatctgggatacatgtgctgaacatgcaggtttattacataggtatacatgtgccatgctggtttgctgcaccaatcaacccgtcacctaggtattaagccctgcatgcattagg[137 bp omitted]gctccacctcctgggttcaagcggttctcctgcctcagcctcccgagtagctgggactataggtgtgtgccaccatgcccagctaatttttgtatttttagtagagatgaggtttcaccatgttggtcaggatggtatcaatctcttgactttgtgatccacctgcctcggcctcccaaagtgctgggagtacaggcgtgagccactgcgcccggcgaaatctctccttttcataaggacactagtcattgtggattagggtccacacgagtgacctcatcttcacttgatgacattggtaaagaccttatttccatgcaaggtcacattcacaggcactgggggttacaatggccacatcttttggtgggggtgggacacacaattcatcccataacagtcctgctttaattctggaaagcctgtatgaataataattgctctggaactccgtcggtgccagactaactattctaaggtcttgagactcatgaactcatttaagcctttctaggatacaggctccgtgatggtctattctacagacgatggaactggggcatggaggcgaaggctcttgcccatgttctcatggtaagcagataacagaagtaagatccaaacccagctgtggaaccaccatgcttaattgctgagatatagatggaagaagatggaaaggaaagggggaagggaagaaaggaacaagtaaagggtacacagagggtgaaaagggccgcagcaggggtggtggcagaccaagacacacacacacagctaatccatcagtcaatcagcaagcatttattgagcacttgttgtattctcagagctccacttggctgtggagagatagcccatgatttaagcccaagttcttacttctacagagctaacttgtgcagagctactggctagaagtgcagtcataaaggagcagtggaaggcattggtctgaactatcacattcattctggccatctggacattggacatgatgcttctgattgtcagacactcatgctccagctccaggatctcccgagggacctgcaggacaaatttcaccaccttcagctccttggacgccttcttctgaatgacgctatcaaaatcacagtctagctggtcactggtgattggccctgttaggacagccaaggtgaactcaaggccatgaagcgtgtggctgaagggagtgaagaacaggaaggccaggtggacatcagggccctagtagaccaacaggcccacagtgccctggaagctgaggctcatctatgccaagcagcaacttcgggcactatccttcgggtagtagagcctggggagaaaggaaagttagaagttaccactgtgctttgtaggcagtgttgcacactggataagattagaagacctggaagcctctacaggtcatacatgacttaggagaaagacattcatccattctttcattcattgagaagacctggagctccaccacctcctcctgtggagctcttgtgatctacttttaccacgtaaacgtttatttatccaacactacgcttattaagcatgtatcaggagctgggctaggaggtaactctttggcctacatcgaatgtcatgatacctgccagaattcacaagatctgatctctgtccatctctccaatcacatttcattccgtgcttcccctaccctgatccagcaataacagctttccttctgttcctcgaatagactgatatagtttggaaattcgtcccctccaaatctcatgttgaaatgtgatccccagtgttggaggtggggcccagagggagatgtttggatcatgggagtggatccttcatgaatgggttggtgccttccctgcggtaatgagtgagttcttgctctattagttcacttgagatctggttgttaaaaggaaactggtgctttcctcccttctctctctcttgctctctctcaccatgtaacacgccagccccccttccccttccaccaggattggatgctctctgaagccttcaccagaagtagatacaggcgccatgcttcttgcacagcctacagaaccatgagccaaataaacctctttcctttataaattaccgagcctcagatatgcctttatattagtacagaatgttatagacataggtaagacacagatcaaggtctttcccactccagacactttgcatttacttttcctttgcacagaattctgttccccaagacttcctcatggccaccccttctcagtattcagccccaggtgaaaggtctctccctcaggatgccttcccagacccccagaccctttcctaaaaagctttcactttactcctcagcacaccgcacgttcggtcgtctccatggcacttactctccatggccatcctgttgacttctttgtttacctgtttatgtcatgttgccccccgggaggaggtacattctacaagagcaagagcctcatctgacctgtatgcagccacggctgcaggacctgggcggactggatctagcaggcatccaggaaatgtttgtggaatcaatgaatgaaagaatgaacaccatggtgagcaaagtgatgtggttcctgaccccacactgctgcacaccttattatgaggagagagagtcaacaaataagcataaataagccctgagttctacaggtgagaaggtggggagtggacaggcacagaggaaaatcatgtgtagacacagggaggcaccatctgcaagccaaggagagaggtctcaggagaaaccacccctgttcacaccttgatcttggacttccagcctccagaactgtgagacaataagtgtcggttgtttaagccacctgatctgtggtacttttttctttgagacggaatctccctctgtcagcaggctggagtgcagtggcatgatctgggctcactgcaacctccaccttctgggttcaagcgattctcctgcctcagcctcccaagtaactgggactacaagtgtgcactaccatgcccatctaagttttgtatttttagtagaaatggggctt[131 bp omitted]caaactaatatacaacccctcattagaagacagatgagcagcaaataaccgccctgccccatgccaggcagggcttttggggaaactctctggggaacatagactggtccagaggcccagaatggctttctcttccctctaccttgcgaccctgaggtcattgacccaaactgctcctcagggtgctaattatctcacctagggaccaaccgcacaggagctagggtgggcctttgaaaaggtgactcagataaagctacttccctgctcaaaacttaacagcagcttcccaccatattcagaataatattccaactcttcccctggcttctgtcatctggttgtgtctgtgtctttgtggcaggttgaataatgtctcctaatgatgtccctatcctaatccctagagcctgtgagtatgtgactttttttttttttttttttgagacagggtctcgctctgtcatcgaagctggagtgcagtggtgtgatctgggctcactgcaacctctgctccccagggttcagcaatcctcctacctcagcctcctaaggagctgggaccacaggcatacaccaccatgccttgctatttttttgtacttttagtagagatggtgtcttgccatgttgcccaggctggtctgaactcctgagctcaagagatctgcctgccttagcctcccaaagtgctgggattacaggtgtgagccacggctcctggccagtacatgactttccatggcaaaagggactctgcagatgagattaatctaaggatcctgagatgaggagaggatcctgggtatctgggtgggcccagtggaatcccatggatctttccttataagagcaaggcgggaggtcagagcaaggaggagatgagatgatagaagcaagaggctgaaggaggggccatgagccaaggaatgcgggtggcccctagaagctgaaaaaggcaaggaacagcttctcccctggagcctccgcaggagttggccctgctaacgctttgggttttgctccataacactcgtttcagatttctgacttctagaactgtatgagtccattctcacactgcgataaagacactgcctgagactgggtaacgtataaacaaaagaagtttaactgactcacagttccatgtggctggggaggcctcaggaaacttatcaggttggcgcaaaagtagttgtggtttttgccattacttttagttgcaaaaccgcaattacttttgcaccaacctaatacagtcatggtggaagcagggcaccttcttcacagggtggcaggagagatgagagagagagatcgagagagagagagcaggggaaactgccacttaaaaaccatcagatctcgtgagaactccctcactctcacgagaacagcataagggaagccacccccaagatccaatcacctcccaccaggtccctctcttgacatgtggggattacaattcgagatgagatttgggtggggacacagagccaaaccatatcgatagagtaagttacctgtggagatatctgtggccttttatctgtggcttaggaacaaaaggaaagacagtttcttgcatgactcagcttaattaagctttcagcttaatttttttttttttttttttttttttagaggcaaggtcttgctctgtcgcccagcctggagtggggtggtaccatcatagctcactgcagcctcaaactcctgggctccggcaatcctcccacctcagcctcctgagtagctgagactataggcttgtgctaccacacccagctaatttttaaaattatttgtagagacttggtctcactatgttgcccaggcagatcttgaactcctgggctcaagcgatcctcctgtcttggcttcccaaagtgctgggattacagacatgagccacagtgcccagccacagcttaagtttttccttttggcatagtgaattggggtcctgagatttcattttcctttcacagagatatggtttggctctgtgtccccacccaaatctcatctcaaattgtaattcccatgtgttggggtaggggcctggtgagaggtgattgatgggagcgtacttcccccttgctgttcttgtgatagtgacggagttctcatgaaatccggttgtttgaaagtgtgtagcacttcccgctttgctctctctctctccttctctgccatggtaaagatgtgcttgctcccccttcaccttccaccatgattgtaagtttcctgaggcctcccacccatgcttcctgttaagccttcggaactgtgagtcaattaaacctcttttcttcatcaattacccagtctcaggtagttctttacagcagtgtgaaaacggaccaatatacacggagacaagcgtggaacaaattctccctcacagatcccagaaggaaccagcgctgctgataccatgaattcacacttccagcccccagcaccatgagaccatcaatttctgtgaagccacccagctagtggtattttgttacagcagccctagcaaacgaacacagcctgcttcactcttcagaaaaccattcactcctgaccctgttcatggtctgtcccctgctgagacgcaagctcaagtaggggagacactgcctatcttttttcacccatgcaaccctcctgcctgttgcagagaaagttctccaacagatacttactgaacgagcataggcatcagagcgactatggtctcccacctacccggccacgttcatcaactctctaaggatcttcttcttgttttccctgacattcttcttggctaatgccaagagtagcaccaccacatctagagtgtaggtgtcagcaagcttgaatgtgtcgtatgtgtcactccatgcctcaatatcacctgaagcataaccaaaccaacaaagaaaaggcatcatgagtttggacaattaattctgcagatttttgtctatttacatcagggcttggcaaactacagttgtggaccaaatccagtcggcccactactttggctttataaataaagttttattgacacatgaggtt[131 bp omitted]tgtaacctccacctcctagattcaagcgattctcctgcctcagcctcccaagtagctaggattacaggcgtgcatcaccacgcttggctaattttttgtattttttaatagagacggggtttcaccctgttgg[136 bp omitted]ggaaccatggctgatgcagcataggtaaccaataaatgttcgttaaatgaaggaagaaaacagacacaatttatccctaatgggagtctcatcgcaggagacacgattgacaagctaaaaggagcccactgtgggaagtggcacaatcaggccccggaggaccacccatcctggatgctaggccttccaagcagctgctcacctgagactggatgaggaatgtgggatgcccaggtggaaggggttggatattcaggtaggacaagaaggctgcagagagaggcagcaacatgcataaacatgcaagaccgagagaggcagcctggcatcctccaggcccaagggtggacaggatgactcactcaaccatcagatgttggagcgtaacaagatgtccccagggcacagcacagctccattcggcctggcctggtggtgatatggtttggctgtgtccccacccaaatctcatcttgaattgtagttcccataatccccaagtgtcgtgggaggtaattgaagcatggaagtggttaccctcatgctgttctcgtgacagtgagttgagttctcacgagacctgatggtatgtatttatttatttatttgagaaggagtcttgctctgtccccaggctggagtgcaggagcgcgatctcagctcactgcaacctccgcctcccaggttcaagcgattctcctgcctcagcctcctgagtagctgggattacaggcacgcaccaccaagcccagcaatttatttttttttgttgttgtatttttagtagagatggggtttcactgtgttagccaggatggtctcaatctcctgaccttgtgatccgcccgcctcagcctcccaaagtgctgggattacaggcatgagccaccgcgcccggctgatctgatgattttataagcatctggcaattgccctgctggcactcacttctccttcctgccgccttgtgaagaaggtgacttgcttggccttcgctttccaccatgactgtaagtttcctgaggcctctcaatccatgctgaactgtgagtcaattaaaccttcttcctttgtaaattacccagtctcaggtatgtttttattagcagtgtgagcatggactaatacaggtggcttctcacctgctcctcccctgcacctacctccacaggcatctatgttgaacaggggaaaatgcatcaccactggtccagtttctcctttcaggatgtagcagctggcgggggccttggaccacaaatccagctcagcctcttctacttggggaaaggggatcttgtggcggcggcagtagtcagtggtagcccggatggtctgagaaggaggcaataagaaatggttgcaagacctctccagaagacccctccagaagacccctggggcctggagacccaatgggacctcagctaacagcccagacacacaacagagcaagggtcagcttggacagggacaacatcttctgtaagggaaagagtaagcctctgccatcacccgcactccccagcccacctagagacaacattcgcgaggttagagagtaacctttggggctgggggctgcgggactcagagggcaaggaaaatggtgcctagatgaggctttgaatcccagctctgccacagaaagatgttggagacctcatctctacagtatatatatatatatatatatttcaattagccaggcatgggggcgtgcacctgtagccctagctactcaggaagctgagatgggaagatcatttgagcccaggagcccaacgagatatgtggtatgggtgcatctcatcacctctgcaaaggatctctgtaatagccacctcacaggggtatttggaagataaatgagatattctccatcatcactgtgtaacagaaatataatgtcaccgtgaaggtacttttcttttcttatttttgaggcagagtttcactcttgttgcccaggctggagtgcaatggcatgatctcagctcactgcaacctccgcctccctggtccaagcgattctcctgcctcccgagtagctgggattacagacatgctccaccacgcccggctaatttcatatatttagtagagacagggtttctccatgttggtcaggttggtgatcctcaggtgatccgctcgtctcagtctcccaaagtgctgggattacaggcatgagccaccgcgcccggccgtaaaggtacttttcaattgtctacttgctgcacttgaagaaagtaaaaagaagtaggagaaattaattttaaaaataaatattaaataaaggtgacaccatggggaaacttaatgagaagtagtttctcagttgtaacaagtttcatttattctctttcctgtggcctccttccgtgctgtcctgaaccagagcaaaaggacactgcatgtctcattactgtagcactgaggttactaaacttacataaaacacatctcagtctctgtgtcttagaaaggcatctgttaagtcctgcaagctgactgacaaaactaagcaaggagaattaagatcaatgcgggccaggcgtggtggctcatgtctgtaatcccagcactttgggaggcca[134 bp omitted]gagacaggagaatcgcttgaacccgggaggcagaggttgcagtgagcccagatagcgccattgcactccaacctgggtgacaagagcaagaaagaggctgggcat[142 bp omitted]gtggcacatgcctgtagtcctagctacttgggaggctgagacaggagaatcgcttgaacatgggaggcagaga[135 bp omitted]tctcacttctaagtgggagctgaatgatgagaacacatggacacacagaggagaacaacacacactggggcctagtgttgggtggagagcgggaggaaggagagggtcagcagaaataactaatgggtactaggcttaatactggggcgatgaaataatcggtacaacaaatccccaggacacaagtttacctatggaacaaacctgtacttgaacccctgaacttaaaagttaaaaaaagatcagtgtgtttgtgttttgcacacaaatgcagaagttgcataagcatatgacttcatagttgtgatctcaagaaaaagggcatttctcctttatcttgttcttgcagttaacgtaagaatattttaaatttctaagtttctgaagtgttagaggaagagatggcccagtagagatgtcggagtaatgtcttatccttttaacatgtggttatttttccttatgtactcaaaggtggcttctttattcagaggagtgatattacaactagaaaccactcattagcaaaaggagatgcagtctcaacaagtgtttcttcttcttcttcttcttcttcttcttttttttttttttttttttttttttgacagagtctcgctctgttgcccaggctggagtgcagtggcgggatcttggctcattgcaacctccgcctcccagattcaagcgattctcctgcctcagccccactagcagctgggattacaggcacgtgccaccatgcctggctaatttttgtatttttagtagagacagggtttcgccatgttggccaggctggtctcaaacacctgacctcaggtgatccacctgcctctacctcccaaagtgctgggattacaggtgtgagccaccgcacccggcttcttcttattttatattgagttgaatatttgagtctaacagttttctacatatacttatctttagagacaggatcttgctgtgtcgcccaggctggagtgcagtggtgcaatcatggctcactgcagcctcaagctcctagactcaggttatcccatctcaacctcctaagtagctgggactacagg[137 bp omitted]catggagcaatcccatctctactaaaaatacaaaaattagctgggtgtggtggcgcatgcctgtaatcctagctacttgtgaggctgaggcaggagaatcgcttgaacctggaaggtggaggttgtggcaagccgatatcgtgccattgcactccagcccgggcaacaagagcgaaactccgtctcaaaaaaaaaaaaaatttgtgtggagatggggtcttgctatgttgcccaggctggtctcaaattgctgatctcaagtgatcctcccaccttggcctcccaaagcactgagattacaggagtgagccaccgtacccagccacttttctacacataaaacagaaatatcatgaaggtgcttcatacctgtattacagaggaatttactgtcataagtaccttctaaagatttgacattcagctgggcacagtggctcatgcctataatcccagcactttggaaggctgaggtgggcggatcacctgaggtcaggagttcaagaccagcctggccaaaatggcaaaaccccgtctctactaaaaatacagaaattagccgggcatggtggcgggcgcctgtaatcccagctactcaggaggctgaggcaagagaatcacttgaacccgggaggcgaaggttgcagtgagccaagatcgcaccacagcacaccagcctgggcgacacagaagactccatctcaaaaaaaaaaaaaagatttgacattcaactatagtagctacatgttggttagtttccttataagccccatcatggaaagaattaaagatgaatttgagaaaaatgaaaaaaaacttagacaatcaggttctgttaaattgttacagatatgtcttgcttaaatttctgtttattggccgggcgtggtggctcacgcctgtaatccctgcactttgggaggc[134 bp omitted]gaggcaggagaattgcttgaacccaggaggt[134 bp omitted]catgcaatatgtcaaaagtgtgattgcctcgatgtgtaatcaattgtgatggtgaatattaggtgtcgacttgattgaagggtgcctggaaagctggtattgtttccggatgtgtctctgagggtgctgtcagaggagatgaacatttgagtcagtggactaggagaggaagactcacccacagtgtgggcggacaccctccaattggctgccagtgtgactagaacaaagcagacagaagaaggtgggagaagctggcttgctgggtcctctggctttcatctttctcctgtgctggatacttcctgcccttgaacatcacactccaggttttttggcctttggacccttagacttacaccagtggctcgccaggggctctacggcctttggctacagactgaaggctgcactgtgggcttccctactttttttttttttttttttttgagatggaattttgctcttgttcaccaggctggagtgcaatggcacaatcttggttcactgcaacctccgcctcctgggttcaagtgattctcctgcctcagcctcccgagtagctgggattacaggcacctgccaccacgcccagctaatttttttgtatttttagtagagacgggatttcaccaggttgaccaggctggtctcgaactcctgatcttctgatccacccgcctcggcctcccaaaatgctgagattacaggcgtgagccaccaggcctggctgggcttccctacttttgaggctttcggactcggactgagccactattggtttgtttcttcctcagctcgcagacggcctattgtaggactccaccttgtgatcctgaaactccctttcatctagacatagatcctattggttctgtccctctggagagccctgcctagtatgtcaatataccaattacgaataaggtctttgacatgcattttccatactcggtcattaaaatccgaggtgtattttatcttcatagcacacttcaacttgggccaggcacatttcaagtcctcaagtgccacatgtggccggcaaccactgtagtggacagcttaggtctctgaagtcgtctttgattgaagtttaacaaatgctgccggttttcttcctattactcttgctattctcatcatcaccagataagcattgttgttaatccagaacaccagctatggaccaggcatggtgcagagactctgcagatctcctgcgagccagatgatgtgattcccattttcaggatgagaaaactgaggttcagaggttaagcctatcgctcggggtcatgcagcagagatttggcagaaaaggactcccaagaccttgatatctcattccacctttatcatattgtcttgggatatttatttcagcagaaatcctaagaccagaaagcctgggtattcctgggccaagggtctagaaagatggtgacaagttggttctggatcatggtatggggaggaggatggatgttcctaattcatattacagaatgtaaactgatagaagtgtgtgaatataaatatatattacattacacataaatataatagatgatatgttttaccatgattattttatatatactactatgtattggtatgtatcatgtaatagatatagttatatattatgtaggtgtatatattttttaataaaatagctgggcagggcggcttgtgcctgtaatcctagccttgggtggtgggagaatcgcttgaggccaggagttcaagaccagcctgggcaacatagcaagaccctgtctctaaaacaatttagaaaactagcctggtgtggtggtgtgtgcctgcagtcccagctacttgggagggtgaggtgggaggatcgcttgagcccaggaggttgaggctgcagtgagctatgatcacaccataagacccagtctcgaaaggaggccatgaggggaggggaagggaggggaggaaaatgtttataaaccccacagtaagtggcagatactgtgctaagcacttcacatgtattaacaagtattaatttaatccacagaacaactcctggtggagccatcgttagcccaattttacagctgaggaaaccgacatgcacagaagttacgcacattggatcaggccacacagctggtaagtggcagagctgggatatgaaggcagggagaacggatcctagtggccactgggaaggtgcaatatgtactaagacaaatatacttgcatatgttctcactcagcaaacatttattgagggccactatttgcccaggaaacccagatgagcaggaagacacgcgctcggggctggagacgtgcacacccggggaaggaggtgcacaggtgaggagctaggctgttgcagttcaaactggtatgaatgggcaggcaggacgcagaagcggggagagtcatctgccaggaagaggggcccgggaaggtctgggatggctttggatcagaagttcgttggatgtggccgaccgcgggtgcttcgggagcgatgggtgagttgatttggctctctggacttcccagccagcacctccccattgcccgcttcccagcccgcgtcctcagttcctccgcaaagtcagcttcgccgcagcccacctcccacccaggaccggccccaaagcccttctcgattacctcgaaaggatctccggcactgaagtcgaaggagaggatgaggtgaacctcccgcgtcgggggcagcacgagtgggaagggagtgttgatggctaaaccagcatccaccaggtggaggtgcttccggctgctcattatcttgtcccggatgccacctgtggtgcccaggaagaaagaggatcagctgcttctggggactgaaagcaagacttggaaatggaaggcagagagggggatgggaaaatgatcgttgtcagtgtagacagcagttgtgaggttgccaactaggagctgacttctctctcttcccagattcatatgttgaagccctggctgggtgcggtgcctcacacctgaaatcccagcactttgggggctgaggcaggtggatcacttgaggtcaggagttcaagatcagcctggccaacacagtgaaaccctgtctctactaaaaatatcaaaattagccaggcgtggtggcgggtgcctgtaatcacagctacttgggaggctgaggcaggaggatcacttgaacccatgagccggaggttgcagtgagctgagatcgcgccactgcactccagcctgggtgacagagcgagactctatctcaaataaataaacaaataaacagacaaacacatgttgaagctcttacctccagtacctcagaatgtgactgtatttggagacagggtctttaaagaggtaattaaggtaaaatggggtttttggcgtgaagttccaaatgaagctgccttctcagcagcaatatgtgagagtgttgttaacccaatgtttctgagacaggtctcggtcagtgtagaaagtttattttgccaaggttaaggatgcacaaccgtgacacagcctcaggaggtcatgatgacatgtgcccaaggcggttggggcacagcttggtttagacattttaggaagacccgagatgtcaatatatgtaagatgaacactggttcggtctggaaaggtgggacaactcaaagcagggagggggcttccaggtcacaggtagataagaagtgaatggttgcattctttttttttgagaaggagtctcgttctgttgcccaggcgggagtgcagtggcgcaatctccactcactgcaacctccacctcctggcttcaagtgattctctgcctcagcctcccaagtagctgggattacaggcacccgccaccatgctgagctaatttttgtatttctagtagagacaaggtttccccatcttggcaaggctggtcttgaactcctgacctcgtgatctacccgcttctgcctcccaaagtgctggcattacaggcgtgagccacgggccggccaacattctttagagtttccattagcctttccaactggaggcaatcagatacgcatttatctcagtgagcagagggtgactttgaatagaatgggaggcaggtttgccctgggcagttcccagcttgacttttccctttaacttggtgattttggggtcccgagatttattttcctttcacagcgtaaaccaaaaataaaatgataagcccctcccccccacccccatccctcccgtccccccgccaacaccctccccaactcctacccccccacaacaccaccccaaccatctgaatgaacccttcctcttggccagggcaccccagagttaacctgaaaacctagttctggccgtgacaggaagggagggtcagacatgcctcacgatgccctcctccctttggggatttaaggaaagctgaccagcatttaatatccacccagagcttaagtctgacaagaatcatttacaatctattctctctgaagcttgctacctggagccttcatcagttactggaaaggggtcctgatccagaccccaagaaagggttcttggatctcatacaagaaagaattcagggtgagtccacagtgcaaagcgaaagcaagtctgttaagaaagcaaaggggtgaaagaatcgttactccacagagtagggtgttacggaaagtaagaggagaaatgcaaccacctcctccttttgttatatataggaaaacaacaacaacaaaaaaacatggggagatgtgctctgctacaag[139 bp omitted]atggtgaaatcctgtctctactaaaaacacaaaaattagccaggcgtggtggcacctgcctgtaatctcagctactcgggaggctgaggcaggagaatcgcttgaacccgggaggcggaggttgcagtaatctgagattgtgccactgcactctagcctgggcaacaaagagcaaaactctgtctcaaaaaaaaaaaaaaccaaaaaccataattactatattttacaagaacttatattattatttttaaagcaaaattaggaatgcgtctgttctcaagatatcaggatatcaggacattcctgggtctgagtctgtttagtaaacattatgaatctgttcccttaaccataaccatctagaggctaggaatgcctaacttcctggggatacagcccagcaaggctgagcctcatttttcctagccctcattcaagatagagtcactctggttccaatgcctctcacacatctgcatgataaaactttgaaacattccaatagaatgactagtgctcttctaagaagaggggattagaacagagacacacatggagcaaagaccatacgaggatatgagaaggtggctgtctgcaaatcacagagagagtcctcagaaagaactcaccccacagacaacttgattttggacttccagccttgagaactgtgagaaaataaatgtctgtcgtttaagtcacccagtctgtgggattttgtcacagcagcctgagcagactaagacagtacctctgggaatggttcctcttgctgatgaaaagagtcaaactctggaaaatatttgaagaggtttattctgagccaaatgtgagtgaccaatggcccgtgacacagtcctcaggagatcctgagaacatgtggcctaggtggttggggcacagcctaggtttatacattttagggagatatgagacatcaatcaaatatatctaagatataccttggttcggtccagaaaggtgagacgacttgaagtcatggaggggtagaggtgaggggtgaggaggggtcgggggggggcttccaggttataggtagatttaaagttttctgattgacggttgggcacagtggctcacacctgtgcacctataatcccagcactttgggaggccaaggtgggcagatcatttgaggttaggagtttgagaccagcctagccaatgtggtgaaaccctgtctctactaaaaatacaaaaatcagttgagcatggtgacatgtgcctgtaatcccagctactcaggaggctgaggtggtggttgcagtgagccaagattgtaccactgtactgcagcctgggtgacagagcgagactccatcgcaaaataaataaataaataaataaaaataattaataaataaatatatggaaaataaaataaaaatatctgattggctattggtttaaagagttattagcaatagaaaggaatgtctgggttatgacaaggggttgtggagaccaaagttttatcacgtatatgatgcctccaggtagcaggcttcagagagaacagaatgtaaatgtttcttatcagacttaaaatctgtgttgaggtggctcacgcctgtaatcccaacactttgggaggccaaggtgggtagatcacgaggtcaggagtttgagaccagcctgaccaacatggagaaaccctgtctctactaaaaatacaaaattagccaggcgtggtggcgcatgcctgtaatcccagctactcgggaggcaggagaatcgcttaaacccaggaggcggaggttgcggtgagctgagatcgcgccattgcactccagcctgggcaaaaagagcaaaactccatctcaaaaaaaaaaaaaaaaatttgtgttgacatgactgctagtcagcttttcctgaattccaaaagggaggagggtataaggaggcatgtccgacccccacttcccatcagggactgaacccatttttcaggttaactttggagtgccctggctgacaggagaggtctattcagatggttgggtggtggggggcttagaattttatttttggtttacactctcatatattgctactgagaaagcgacttcatccaaccccttcagggagaaatttgatgctaaaacactcatcgccatgatccagtgacttgatgcttgatggtgtattccgaggccataagacccggcagctgcatggcatggtgcgcagacacagctgaagtcctgtgtgccttgtaggaagcaccccaggagaggtgagcaggactgacatccagccagggttcccttcccaggccacacacagccctggccaggggggcacattttggaattcacccccctggaagatgcaccttttctcgatttgcacaagggcaacaggaccacaaacataaagatgttcacgatagtcttgtaacaaaagagtggggaaggccaggtgtggggtggctcacacctgtaatcccagcactttgggaggctgaggtgggaggatcgcttgagcccaggggttcaagatcagtctgggcaacatagtgagaccccatctctatgaaaaagaaaaagaaaaattagccaggcatggtgctgtgtgcctgtgttcccagctattcgggaggctgaaatgggaggattgcttgagctggggaggctgaggctgcagtgagccatgattgcaccactgcattcccacctgggcaacagagcaagacacacacacacacacacacacacacacacatacacatacatgagtggtgcagggattggcatggtcataggagaggatctccaccagctatgaacattggagcttatggagactattaaatggcctcagtgtgagttcccaggagtctgacatcaattccacctgaatgagagggtcagtcccctgaagggaaaacccatacaaatgtgtgttgttttttttttttttagatggtgtctcgctctgttgccaggctggagtgcagtgggatgatcgcggctcactgcaacctctgcctcctgggttcaaacgattctcctgcctcagcctcctgagtagctgggactacaggcacccgccaccctgtccggctaatttttgtatttttagtagggacagggttttaccatgttggccaagctagtcttgaactcctgacctcaagtgatccgcccgcctcagcctcccaaagtgctgggattacaggcatgagccactgcgcccagcccatacaagtgtttttgaagaccaggtcctaggactagctgacaagaaattagggttttttgcatttttgcaaaaccagagaaagccatcagtgaggcttttcacgatgactgggactcgcagcgaggccacacatttttcagtatggaccacaccactgagcgaaagttcccctaatcagatccctgggccctttgacaccacccccctccaaagctctggggaaggaccagcctgggattgtttcaggcccacccccttcccctactccagcccattcacacgcaaggacagaccagggcggtgggaagagggtcttctcaccgtgtttgtacaggaagttgtgagtggtcccccattcccactttgaagcgcaaatgcctgttttcttcacaaaatccatcaagttactgagtgagcctagggaaagaagccgagacagccaaggtgagttcaggagactgagtggtttctgcccccaccaaagtcatatgtggaagccctcatcccccatggggttgtatctggagacaggacttttaaagaggtcattcagggccggcgcgttggctcacgccagtcatcccagcactttgggaggccgaggcagaaggatcaccatatcaagagatcgagaccatcctggccaacatggtgaaaccctgtctctactaaaaatacaaaaattagctgggcgtggtggtggcgcatgcctgtagtcccagctactggggaggctgaggcaggagaatcgcttgaacctgggaggcagaggctgaagtgagccgagatcgtgccactgaactccagcctgatgacggagcgagactccatctcaaaaaaaaaaaaaaaaaaaaaagtgggggggtcattcaggataactgaggtcatgagagtgggatcctaattcaataggactggggtctttatgagaagagaaagagtgccaggcaccagagtaatcccaggacttagggaagccgaggtgggaggattgcttgagcccagaagtttgagaccagcttgggcaagagagcgagaccacatctttacaaaaataaaataaaataaacaaattagctgggcatattaatgcatgcctgtggtcccagctattcagaaggctgaggcaggaggatcacttgaacccagtagttcaaggctgaagtgaactatgtatgattgtgccactgcactccagcctgggcattccagcctcacttgtatcactcagatcatttagatacaagggagaccttgtatctaaaaaaaaaaaaaaaagaaaaaaaggaagacaccaagaataccaagaatgcgtgtgcactgaggaaaggctgggctgagaggatgcggtgagaaggcggccatccctctgcaagccatggagagaggcctcaggagaaactgaccccactggcaccttgatcttggacttcctgcctgcagaattgtaagaaaataaggctgggcacagtgactcacatctgtaattccagcactctgggaggcccaggtgggtgggtcacttgaggtcaggggttcgagaccagcctgggcaacatggtgaaaccccatctcaaaaaaaaaaaaaaaaacggtgaggaaataaaagcctatagttgaagccaccccacttcaacttttgttagggcagcagagctgacaaatctggtgagctgggaaaggttggcatacaggggcctgggggtcctggccgtcagatccagcatctatcattgagccacaggtgagatgactttgagccattggggttgggggagttggcaaggaaaagatggcgatttaatgactgtatgatcacctgtgtatctggggaaatgagcttgttctctttaggttcatgggggagaacgacgcagaatgttccaggagctgttccaaaatgcccagcacactttcccgtgctcccttccccagcccaagaggctgccaagtcagtcagggataaaccaggtcattatcccagacgcctgcctcttcctcaccctcaccctggactatcaccaagacctgccaattccacctcctcttcagtgtctctgctcctcccaatctcatctgccagtaccttatgcagcatcttttccatccaggatgcaacactgcctccccctctgatttccctcttcctggtttttcagctccaatcctttctctgaacagcaggggcagagtggcaagagagcaaagctagtagggaggtgggtgcttgagctagatgctgatttgaatttgacttcatcactcattagctgtgtgaccctgagcaagttacttttatttatttattttttcttgagacagtcttgctctgtcacccaggctgtagtgcagtggtgcaatctcggctcactgcaacctccgcctcctgcgctcaagtgattctcctgcctcagcctcccaaatagctaggaccacaggcacccaccactacgcccggctaaatatttttttgtatttgtagtagagacggggtttcgctatgttggtcaggctggtctcgaactcctgacctcaggtgattcacccacttcggcctcccaaagtgctaggattacaaacatgagccactgcaccgggcccctgagcaagttacttaacatctctgttctcatctgtaaaaccaggaagagagtaacacctatcccttatagatttatgaggaataagtaagagcctgcctatagcacttaggatgttgggaggatggtttaacatgtcaactaggctgggccacagtaaccagttatttaatcaaacactagcctagatgtggctgtgaaggtattttgtagatgtggttgacagctaaaatcagttgacttcaagaagattattctcagtaatgtgggtgggtctcatctactcagttgaaggctttgagggcaaaacagtttctagagaagaagaaattctacctccagactggagcgtcaaattctgcctcatgcatgcgtatgctcattgcagcactattcacaatagcaaagacatggaatcaaccaaatatacccatcaatggtagactggataaggaaaatgtggcacatatacaccatggaatactatgcagccagaaaaaggaacaagatcatgtcctttgcagggacagggatggagctggaagccattatcctcagcaaactaatgcaggaacagaaaaccaaacaccacatgttctcacttataagtggcagctgaatgatgagaatatatggacacagggaggggaacaacacacactggggcctgttgagggggcggtgggagggaaaacatcagggtaaacagctaatgcatgtggggcttaatatctaggtgatgggttgataagtgcagcaaaccaccatggcatacgtttacctgggtaacaaacctgcatgtcctgcacatgtatcctcaaactttaaattaaattaaattttaaaaaatcctgtctcggtttccgcctgttggcctgccccatggattttggacttgtcatcttcacaatcccatgagccaatttgttaaaataaatatctctagttagatagatagagatagatagctataaatacatagatatagatgcatagatttgggcagacagagacatagataggtagatatagatagatagatatcttattggctctgtttctctgaagaaacctaacacatccagcaaatagtaggcacttaataaatattaacttctacaagagtttagcagcagaaaagcaaatcacacctacattgctttgatagccctttaatatttaacatgttaaagaaaactaaatgtggcctgaggactccatacttcttctttttttttgagacagagtttcactcttgttgcccaggctggagtgcaatggcgtgatctcagctcactgcaacctccgcctcccgggttcaagcgattctcctgcctcagcctcccaagtagctaggattacaggcatgtgccaccacgcccggcgaattttgtatttttgcatttttagtagagacagagtttgccatgttggccaggctggtctcaagctcctgacctcaagcgatccgcccaccttggcctctcaaagtgctgggattaaagccatgagccaccacacccggccattctatcttatatttttatttatttattttagagaggaggtctcactacgttgcccaggcttgctggtcttgaactcctggcctcaagcgaccctcccgcctcagcctcctgagtagctgggactacaggcgtgagccatcacacctggcttttttaaatgttttatctatttattaattttgtttaaaaaagatgaggtctcacagtgttttccaggctagtcttgaatacctgggctcaagtatatcttatagtaagttaagaattggccgggcacagtggctcacatctgtaatcccagcactttgggagcctgaggtgggcggatcacaaggtcaggagttcaagaccagcctggccaatatgatgaaaccctgtctctactaaaattacaaaaattagccgggtgtggtggtgcatgcctgtggtcccagctactcgggaggctgaggcaggagaatcgcttgaacccgggaggcagaggttgcagtgagccaagattgcaccaccgcactccagcttgggtgacagagcgagactccatctcaaacaaacaaacaaaaacaaaaaacaaaacaaaaaaaagtacgttttttaaaagaaaactttttaagggatgggggtctcactctgagtgcagtggtgcattcatagctcactgcagcctccaactcctgggcttaaggaatcctcccacctcagcctccccgaatagctgggactacaggtgcacgcaccaccatggccggctaggatgcatgttctcatttcagcacaggagccaggcattatagaaagtcatagtgaggcttcgtgtggcacattccatctctctccattacccaccggaggggtaaacccaagcctctcatctgccagactgaagtcagtagatgaactctggctgactttccccacatttccacttggtaggctcattgtcactcattcttcaagttgcttctgagctatcaccttggaaaaggaggcttcttcattaatcccatctaaggggagcttggccaacaatagctcagagacatcaagttaatagtcggctccctctttaaattgtagacaaaggaaaccagagaatagactgatttcatccaacagagataaaaacaggaatttatgtaacatgaataaaaggaggaggaagggaaatctagagtctgaagagagtacaccttgatttcctttccttggtgagctgctgatgagctggtcaggaggactctgggtgtgtctgtgcctggacaccgggtcatcacagaggtgagaggttggatgtctgggggtgagactggctgtacctgggtcatctcaggaaggcagtggcttcagcgaccaactgtcttcattgtccctcatccacgctacttcactctcagaatttttcaccggatacctgctctcgcctctccttgtctctccatataatttacttatttattattttttcgagacagggtcttgctctgtcacccaggctggaatgcagtggcacaatcatagttcactacagcctcgacctcttgggctcaagtgatcctcctgcctcagcctcctgagtagctgggaccatgggaacgcactaccatgtccagctaattttttacaaaaaattttgtagagatggggtcttgctatgttgcccaagctggttttgaactcctgggctcaagtgatcttcctgcctcagcctcccaaagtgctgggattacaggtgtgagccactgcacccagccctctccatagaaattagcccagtcggggatggacttgcctgtggttggcttacctgtctattctccatctcgtcctctagaccatgagtcctccaggcaggcacttggtctgacatttcccctttgtcacccctacccccagcctgctagtaggagagttattatttcatgctaatgactcaagacatcctagatggatggatggccggttgggtggatagagggtgggcgtatcagtccattcttgcattactataaagaagtacctgaggttggataatttataaagaaaagaggtttaattgtctcacagttctggatgctgtacaggaagcgtggtgctggcatctgcttctggtggggcctcaggaagcttccaatcatgatggaaagtgaatggggagcaggcacatcacttgccgagagcaggagcaagagagcgagggggaaggtgccacacacttctaaacaaccgtatctcacatgaactcagagcaagcacttactaatcaccaagaggatgacgctaagccattcatgagggatccgcccccatgatccaatcacctcccaccaggccccacctccaacactggggattacatttctttttcttttaatttaatttaatttaatttaattttaagttccgggacacatgtgcaggacgtgtagatttgttacacaggtaaacatgtgccatggcggtttgctgcacctatcaacccatcacataggtattaagccccacatgcattagctaattttcctggtgctcttcttctccccacccgcccccaacaggccccagtgtgtgttgttcccctccctgcgtccatgtgttctcatcattcagctcccacttataagtgagaacatgtggtgtttggttttctgttcctgcaatagtttgctgaggataatgacttccagctccacccatatccctgcagaggacatgatcttgttcctttttctggctgcatagtattccatggtgtatatgtaccacattttctttatccagtctatcactgatgggcatttgggttgattccatgtctttgatattgtgaatagtgctgcagtgaacatacatgtgcctgtatctttctaacagaatgatttacattcctttgggcatatacccagtaatgggattgctgggccaaatagtatttctggatctagatccttgaggaattccacactgtctcctacaatggttgaactaatttacattgggggattacattccaacatgagatgtggaagggaacaaatatccaaactgtaccagtgggacatctggtcatgtcccctgcaggactggcccacaggggtggggaagagcaagaggggggagaaggttggtggcacttactgttgatgacacttatcacactacacatggtacctttcctttcggggtcctcatggggctgctcctgcttttccagggaggtcctggtccaattctcgagcatctcagtcagccaggtgtgttcaggctcaccgccttcatctacgtcaagaaatccaggtggtctcagacactgtccaagtaccctaccaagaacatcacagaccctgctctgcctcatcttctgcaatgccctgcggttcctcctgaggtgacctccttctccaggtgaccctctctccccttgccttctgctgacccccatgttacctcactctctctgactttctggcctcttttttctagctccttcatctctgcctccacctctactcatcttttgcacgcttattttcttcagggttggaggcaaagtctcccatttatttatttatttatttatttatttatttatttatttatttatttgagacagagtattgctctgttgcccaggctggagtgcaatggggcaatctcagctcactgcaacctctgcctcccagtttcaagaaattcccctggctcagcctctggagtatctgggactacaggcacgcaccaccaccaggcccggctaatttttgtatttttagtactgatggggttttaccatgttggccaggctggtctcgaactcctgacctcaagtgatccacccccctcagcctcccaaagtgctgggattacaggcattgagctatcatgcctggcatcccctcttatttttatccacactcatgaattagatgatgttcaactctctctctctcacacacacacactgataatagctctgctcacgtttgctgagaacgtcacctgccaggctcatcttggcattttgcataaattctacacttcaaccttcaccgcattccttggagtgagctctctgaggcttcttttataagggattaatccaaatcaagagggctccaccctcatggtctcaacacctcccaaaggccccatctcttaataccatcaccttggggttgccatttcttttttgttgttgttgttgttgagacaggttgtcgctctgtcaccaggctggagtgcagtggtacaatcaccagcctaccatcccacaacattagttagccatttgcaggttggagatagattctccttccagacttgtctataaccagcatatggtgaatgctgatgtcaaaaaacaacattaaagcccgccatgtggcaagaagttggctctctgcaacccagaagagggttccccagaatccaaccctactggtactctgatcttgggcttccagcctccagaactgagaaattaatctctgttgttgctaagccagccagcctatgtatggcactttgttctggcagccttcacaactaaaacagggagggaggcatgaagtggatgaagggctgtgctcaggacctaccttcactctgtacctgactgttgacctgtgaaaaagccacacttgcatcttccacaactggaaggaagaccatctttgtcagcctctgctgtagttaggttggggccatgtgactgatcctggccaacaggaggtgtgtggagctggtgcccaatacttccaggcctggctacaaaaggccttctgtggcactccagctctctcctctcatggaacagacaaggagaccttgtgccaagaggagaagcaacgagatgcaagcagcttggcccagcgcggtggctcacacctgtaatcccagcactttgggaggcccaggcaggcagatcacttgaggtcaggagttcgagagtagcctgggtaatgtagtgaaaactcgtctctactaaaaatacaaaaattagccaggtgtggtggcagttgcctgtaatcccagctattcaggagtctggggcaggagaatagcttgaacctggaaggcagaggttgcagtgagctgagattatgccactgcactctagcctgggtgacacggctagactctgtctccaaaaaaaaaaaagaaaaaagaaaaggaaaggaaaaaaaagacgcaaacagcttggatgcctaagtccccacatggagccaagttgccctggaggaacactcaacccatatcgctttttgggtaagcaaaatataaaccctttgtgtcttaagctatagcaatttgtggtttctttgcgcagcatagcctctcctgaacaaatatagtctcctccataatataatctaacttctccatacagaattcatctgatactttgttcttgttctccgtactcccaccatgggtcaagtctgattccttcatgactcccaacctatgtagttttgggaagtatttttcctctcaatttgctaattgcctcaggctgttcccattttctgcctctgacacttggatcctaggcatacctagggtatatctgacgactatgtacatggatcctatggttagactcatccaaaaagctcctaggtctaatgaatgaattcagtagagtttcaggatacaaaatcaatgtacacaaatcagtagcactgctatacaccaacaatgaccaagctgagattcaaatcaagaactcaaccccttttacaacagctgcaaaaaaataaaataaagtactcaggaatatacctaaccaaggaggtgaaagactgctacaaggaaaactacaaaacactgctgaaagaaatcatagatgacacaaacaaatggaaacacatcccatgctcatggatgggtagaatcaatattgtgaaaatgaccatactgccaaaagcaatctacaagtccagtgtaattcctatcaaaatactatcatttttcacagagtgtcagtttgaactccgatcctgcccctcctggctgcgtggcctcaggcacctgggagagtccatgctcctctccattcccaaaggagcaccacatgaatcagacacgtaaagtttttaggacaatggctggcttcaagccagtgtgcagtccacactatcattagggattcatggcaaagtaggatgcttaccttctgggggaggatgttccccttgtgaactttcttgcagcctcagtaatcgggctgcaaaagagcagaggcagggggaatgtttaactgtaaagtcactagttatagaaaatacagattacctgcagcgacgtctctttaatagaaatggcagccatgggttggagtctgttgatacgggttctggagagctaattttgtacccgtcttccaactctgtgctcgctgacctcatgttggtagcttgaaatttgccatgatgtgatcaagtgggtttcatactaggaatgcagggatggcttaacatatgcaagtcaacaaatgtgatatatcacagaaacagaattaaaaacaaaaatcataggagatgcagaagcatttcacaaaatcccacatccctttatgattaaagccctcaacaaaatcggtatacaagagacatacttcaatgtaataaaagccatctatgacaaacccacagccaacattacactgaacagggaaaagtttaaagcattccccctgagaactgcaataagacaagaatgcccactcttatcacttgtattcaacatagtactggaagtcctagccacagccatcagacaagagaaagaaatgaagggtatccaaaccagtaaagaggaagtcaaactgttagtgttcactgatgatatgattgtacacctagaaaaccctaaagactcatccaaaaagctcctaggtctgatgaatgaattcagtagagtttcaggatacaaaatcaatgtacacaaacagtagcactgctatacaccaacaatgaccaagctgagattcaaatcaagaactcaaccccttttacaacagctgcaaaaaaataaaataaaatactcaggaatatacctaaccaaggaggtgaaagactgctacaaggaaaactacaaaacactgctgaaagaaatcatagatgacacaaacaaatggaaacacatcccatgctcatggatgggtagaatcaatattgtgaaaatgaccatactgccaaaagcaatctacaagtccagtgtaattcccatcaaaatactatcatttttcacagaacaaaaaatcctaaaatccttttttttttttttttgagacttagtctcgctctgttgcccaggctggagtgcaatggccaattttggctcactgcaacctctgcttcccaagttcaagcgattctcctgtctcagcctcccaagtagctgggattacaggcgcatgcaccatgcctggctaatttttgtatttgtagtagagatggggtttcgccatgttggccaggctggtctcaaactcctgacctcaggtgatccacccgccttggcctcccaaagtgctgggattacagacgtgagctaccatgcccagccacaatcccaaaatccatatgaaccaaaaaagagccctcatagccaaagcaaagactaagcaaaaagaacaaatctggaggcatcacattacccaatcaaattatactacaagcctatagttaccaaaacagcacggtactggtataaaattaggcatgtagaacaatggaacagaatagagagcccagaaataaagccaaatacttatagccaagtgatcttcgacaaagcaaacaaaaacataaagtgggggaaaggacaccttattcaacaaatggtgctgggataactggcaagccacatgtaggagaatgaaactcgatccttatttctcaccttatacaaaaatcaactcacaaattcaatgtgaatttgcatcaaagacttaaatataagaccagaaaccataaaaattctagaagataacatcaaaaaaactcttctagatgttggcttaggcaacgagttcatgaccaagagcccaaaagcaaatgcaacaaaaacaaaaataaacatatggatatatgggaacgatggctcacgcctgtaatcctggcactctgggaggcccagctgggcggatcttcaggtcaggagttccagaccaacatgacgaaaccccatctctattaaaaatacaaaaattggccaggtatggtgttggatgcctgtaatcccagctactcaggaggctgaggcaggagaattgcttgagtctgggaggcggagattgcagtgagccgagatcgtgctgctgcactgaagcctgggtgatggagtgagactccgtctcaaaaataaacaaatatatgggacctgagtaaattaaaaagcttctgtacagcaaaggaagtaattatcagagtaaacacacaacccactgaatgcgagcaaatatttgcaaactaggcatccacaaaagacgattatacagaacctataaggaactcaaagaaatcagcaagaaaacgaataatcccaccgaaaagcatcccaatgatatgaatagacatttctcaaaagaagatattccagtggccaagaaacatatgaaaaaaatggtcagcatcactaatcattaaagaaacgcaaatgaaagccacaatgagataccatcttactcccacaagaatggccattgataaaaattcaaaaaaaaccatagacgttggtgtggatgcggtgcaaatggaacactcacacactgctggtgggaatgtaaattagtacaacctctatggaaaacagtatggagagtcctcagagaactaaaagtagatctaccgttcgatccagcaatcccactactgggtatctacccaaaggaaaggcagccattatatgaaaaagacacttgtgggctgggtgcagtggctcacgcctgtaatcccaacactttgggaggctgaggaggggagatcactcgaggtcaggcgttcaagaccagcctggccaacatggtgaaaccccatctctactaaaaatacaaaaattagctggatgcggtggtgcacatctgtagtcccagctacttgggaggctgaggcaggagaatcacttgaacccacgagttggaggttgcagtgagattgcaccactgcattccagcctgggcaacagagcgagactctgcctcaaaaaaaaaaaaaaaagacacatgcacatgtatgtttatagcagcacaattcacaattgaaagatatggaaccagccgagcatggtggctcatgcctgtaatcccagcactttgggaggctgaggcgggtggatcatgaggtcaggagatcgagactatcctggctaacaccggtctctactaaaaatacaaaaaaaaaaaaaaaaaaaaaattagctgggcgcagtggtgggtgcctgtagtcccagctactcaggaggctgggccaggagaatggcgtgaacctgggaggcggagcttgcggtgagccgagatcgcgccactgcactccagcttgggtgacagagtgagactgtctcaaaaaaaaaaaaagatatgaacccacctaagtgcccattgacaaatgagtggatacagaatatgtggtatataaacaccatggaatatgactcagccataaaaaagaataaaataatgtcttttgcagaaacttggatggaggccatcattctaagtaaagtaactcaggaatgtaaaaccaaaaaccatatgttctcacttataagtgggagctaagctatgggtacgcaaaggcatacagagtggcataacggacttcagagattcagaaagaggagggtagggaggtggggataaaaaactacacattggggccaggagtggtgggtcatgcctgtaatcccggcactttgggaggccgaggcaggtggatcacctgaggtcaggagttcgagaccagtctgagcaacatggagaaaccctgtctgtactaaaaaaatacaaaattagccaggcatggtggtgcatgcctgtaatcccagctactcgggaggttgaggcaggagaatggcttgaacccaggaggtggaggttgcggtgagcagagatcgctccattgcactccagcctgggcaacaagagtgaaattccgtctcaaaaaacaagaacaaaaacaaaaaaacactacacattggggccaggtgtggtggctcatgcctgtaatcccagcactttgggaggctgaggcgggcagattgcttgagctcagaagttcgagaccagcctgaccaacatggcaaaacctcatctctactaaaaatataaaaattagccgggcatggtggtacgtgcctgtaattccacctactagggaggctgaggcaggagaagcacttgaacccaggatacagaggttgcagtgagacgagatcttgctactgcactccagcctgggcaacagagtgagactgtcacaaaaaacaaaaccaaaaaactacatattgaatgcaacatactctaaaacatacactgatgggtggactacagtctcagaatttactactacataattcatcgtgtaacagaaaccacttgtaccccaaaagctattgaagtaaaaattcaaaaaaaaacaaaaaaatcttaatatttaaaaatattattacctaatagtagcagtgttgatccttataattaaaatattgtacatgttataactttttacttgagaccaaatcaaaattcaatttttccacatgtgctgaaaatgcgatagaaagctaagtcctgatacacgtcggttaggtcaagcttctgcttcatctttttcaaatttttgaattgtcaataaataaattttgtctgcttttttttctttttctttctttctttcttttttttttttttttttttgagacacagtctcgatctgttgcccagcctggagtatagtggtgcgatctcggctcactgcaacccctgcctcccgggttcgagcaattcccctgcttcagcctcccgagtagctggggttacaggcgcccgccaccatgcccagttaatttttatatttttagtagaaacgaggtttcaccatgt[222 bp omitted]tgcctcagcctcccgagtagctgggactacaggcgcccgccactacgcccggctaattttttgtattttttagtagagacggagtttcaccatgttagc[133 bp omitted]tattgacatttaagaggacactcccatgtgtcaagctttgctctaagtactttacatacatgaggtcatttaaaccccacatcaaatagtacatagtcccaatcttgtatatttgatgtatatttacatttatttgatataaatatacaagattggggctatgcactattgtatccattttacaaaggagaaattgggtcacagagaattttgttgttgttgttgattttcttttctttttttttttttttttgtttgtttcatttcttttttttctttttctttttcttttttctttttttttttttgagactgtgtttcactcttgttgcccaggctggagtgcaatggtgtgatctcagctcactgcaacctccacctcctgggttcaagcgattctcctgcctcagcttcccgtgtagctgggattacaggcatgtaccaccacgcccggctaattttgtatttttagtagagatggggtttctccacgttggtcaggctggtctcaaactcctgacctcaggtgatctgcccacctcagcctcccaaagtgctgagattacaggtgtgagccactgcgcccggcccctcatttctttattttttaatttttttcacagagaatttaagcagctttctagggtcactaacgcatgagaggtggagctgggatgtggattcaggcagacaggctttggatcagaaccaccatacgattcccctatagatccctgtgtctgcactcaccaaccagttacataggtgagtcacgcatcctttccatgacccggtggctctcagcaaaatggaggggacaacagcatccacttcttcaggtcattcaaagggttaaatgatgaacaggtaacgaatgccaattttgtgtgtgtgtgtgtgtgtgtgtgtgtgtgtgtgtgtgtgatggagtcttgctctgttgcccagactggactgtagtggtgtgatcttagctcactgcagcctttgcctcctggtttcaagcgattcttgtgcctcaacctcctgagtagctgggatcacaggcgtgcaccaccatacttggctaatttttgtatttttagtagagacgcattttcaccatgttacccagcttgcactcgaacccctgacctcaagtgatctgtccgcctgggcctcccaaagtgctgggattacaggcatgagccactgcgccgggccaggctgcttgcatcttgttgcccaggctggagtgcaatggtgtgatctcagctcactgcaacctccgcctcctgggtttaagagcttctcctcttggcacaaggtctccttgtctgttccatgagaggagagagctggagagccacagaaggccttttgtagccaggcctggaagtagcaggcaccagctccacacacctgttggccaggatcagaaacctgaactcctggcctcaaatgatccgcccgccttagcctcccaagtgttgcgattacgggtgtcagccactgcatccagccagattgctaatgtttactgagtgcctttatctaccagacactgtcctatgtgcttttgatgaattaactcatttaatcctcataactactattattatcacccacatggcacagaggcagaaactgaggcacagagaggttaggtaacttttcagaggtcacaaagctcacatgtaccacagcaacattccttccaagggtgtctgtactctcatccactctgtggtcttcctggctgcccataatcaatgttcagtgtatgagaataaatgtcaggaaatgtggttgttagaaccattatacacaggcctcttttctgccacatgcaggaaaagtactgtgaatctccttgcataaaatatctctaggctttgacctttctgttccccaaatactcaccaaaaataaggtgtccaatgcttttagcattagcaacagcccttctccataaacctgccaagaaaatagcaataaaattcaaacattctccatcacatgactgtcatgtttgatattcaaagcaccagcagactggcataaagcactgcagggatctgcagcaggaagaaagatcattcttccattccataaatatttatgaagcaatcagtgggcacccggcactcttctgactgttggaatagagcagtaaacaagacagatttgtcctcaggaaccttctatgggtggagccagccgggcactgtagactggctaccccaaggccatttcaagctcccttccatgccaacgtttctcagcccacaggcaggaagggcaaatatttcccagcctcccttgcagctagagggaggtcaagctctggcccatgcagatttatgggggcacttctggaaagtcctagctgtcctactatgaaagagcaggacagcaaacatgttggattagaggcattgctggcatacccctcccacttggaaggacaaaacactgtgtagagattcacactgtgaacttttttttcaagaagtgattcaggaattagacaggaaatctgaaggaatccacagtccctttgaaggaagtgacgggctgcagcctatactgtgactcaagtgaagggctgcgagtccccagggtgtgagatggggaaagactgtttgcaggacacacgcccccaccacaccagggagcctgaaagtccagtctctggggtaaggccttaaccctattcagtgcaggatatgacttggggaggttcgtggaatataagtaggagctgtgggaagaaccctgcatgcactcccagatcccagtatggacccagggaagccattccttattgttcctcacagggcaccctgcagtggtcagccaaaaagttcaggtgggtggtcgcaggttgaaagaagcccccagctgggtttcatgagataactgtgggtggaggtgaacttctccacccacatggggtgaatgaaaagcaagctgcagacacgtgtgcaggaccctggcacatggctaggtgggatagatggggaggggcatggcctgagagcagtggttgctatctctgcagggaaagcttatgacttgggggcatttgcaagttctgagcacaggctgcctggaacttagctcaccactgccagtggaacagggtgggaggggatctgcctcgccaagtgtgtgggatccgcgtggggcttactgccacctgccactccccactccctacacaaactcttctgtgcagcagaggcagaaacattcctctctggattatcagcacatgggtctgaaaaccacccccaccccctgatacccacaggagctgctgcttgccctgcacagggagagttagagcacaaaactgcctgacccagcccacacctggctttgccctgccacccgccctggtggctttaatacaaaggacggaaacttttgggaactctgtggctctgcccattgcctgagaaacaagagtagccaccctgggcaacatagggcaagtgaatatcccactgctactactgcagctggtgctccacctgctgggtggaggccaaccaacacagtccatgacagcatctcctggtaggataacactgggcccaggaaggagaaaatggctctatgtcctcagctatcaccactgcatgcaccactctggctaaccaggaggtcctgagtctgtccacatgatcagttcattactactataactagcattcaaggaagccaacctactaaggctgtccatcagcaaggaatctcacagagcctgtgtctctctcctgccacccccattagagctggtgctgcttcccattgctgggagtctcgaggacaggggacattaccggattccttggagacattcccaagaaccagcctgaagtgtggcagcttcactgggtggctagacccagaggaacaataacactcactgtagtctggtgctcagtgactcctatcctaggggaatggggagtgcaccacatcaagggaacaccccatgggacaaaagaatctggacagcaggacttgaaaatcagatctttctgctggtgggaagtttctttcagcagggacacagtttcagtgctgggctcagcacggaaagcccacagctctaacccaaccatcagacagccctggtgtgcatgaagggtcttggataaggggatgtctttcccctctcttccactgccacaggcacagttggggtttctcccatgggagctcagcatgggtacaactatagacagcctttctggaacatatcagggcgactgcatccccacaggaggagcccctctaggtttaggcttgcataagagacagattcacagttcctctctactcagaacaccaacattcctacagatgaaaagaggtgcccgtctgatctgaatagctggagcactggatcacgagtgtgtctgagagatggatggctttctggctgacctggcaggggagctgaggtggctccaacccttctgcctgataagaccacggtgcacagccaggcatggtggctcacggctgtaatcccagcactttgggaggccgaggtgggcggatcacctgaggttgggagatcgagaccagcctgaccaacacggagaaaccccatctctactaaaaatacaaaattagctgggcatggtggcaagtgcctgcaatcccagctactcaggaggctgcggcaggagaattccttgaacctgggaggcggaggttgtggggtgagctgagatcatgccattgtattccagcctgggcaacaagagccaaactctgtctcaaaaaaaaaaaaaaaaaatctcgatgcaactcactgagagctcctccagccacctctgtcaaggctgggacctttgctcaccattgggtgttgcatttactcacatgttttggccacaatcacttcctatgcactcccctacagacctgaagcctgaaccatcaaaccagtcaataaaatactggggaaaaaattgcatgccttgtggggaatgagttaagcttcaagagtcttctaccattccagccctgtaggcaacagtgaacttgctcacacagtgagcacatcgcttctacaaccagcatatgagaaagccatcacacgaagactccctatatccaaggaactcttacaatcttcacccctgaaagcaccaaggaccaaattaggctataattagctagggacattaaagtcacatccttaagcggaaaaaagaaaaaaaaaacacagtcaaatccaacataaattcaagaataattaaaagaaatagtctactcaaatgagaaggaatcagaaaagtaactttggtaatatgacaaaacatggttctacagcacccccaaaagatcacactacctctccagcaacagatccaaatcaagatgaaatctttgaaataccagataaagaattcaaatgggcaccaaatgaatcatacatgtaatgttcctaggacaatggctggcctcaagcaagtgtgcggtccccattatcatcagggattcatgatgaagtaggatgcttacctttcagggtcagattccttaactggtctgcaaaagagtagaagcaggaggaatgtttatctgtacaacaaagtccctagttataatataaaaaatacagatgacctgcagggatatttcattaatagaaatggcagccatgggctccaatggcagccaatggctctcgagagccaattttgcacctctcttccaactctgtgctcagtgacctcatgttggtagcctgaagttggccacggtgggaacatttacaccacaggaattggcaaacactacatatcaggaattttgtttttgttttttagagagaaagcttagcagacccactggagaagtaacactcagacccatctcacacctttagttagccatttggaggttggatatagatagattccctttttagttttgtttttaaccaagctatggtgaacaccaatgtcaaagaacaacatcagcccgggcgtggtggtttatgcctgtaatcctagcacactgggaggctgaggcagtgaatcacttgaggtcaggagttcaagaccagcctggccaacatggtgaaatcctgtctctaccaaaaatacaaaaattagccaggcacggtggtgcgcgcctgtagtcccagttactcgggaggagagttgcttaagcctgggaggtggaggttgcagtgaactgagatcataccactgcactccagcctgggcaacagagcaaaactctgtctcaaaaaaacaaacaacaaaaaaagtcaaagtgtaagaactaggacagtgcctggcacacaggaggtcccatgaatatacattaaatgaatgacgagtggtttagggtgtgaactcagtaatgatcctaaaaataagattaacatgtaatgaaacactcccatgtgtcaggcttggctctaagcattttacatacatgaggtcatttaaaccccacatcaaatatacgagactgcgactacgtactattgtctccattttaggaaggggaaattgggtcacagagaatttaagcagctttccagagtgagcagtgcaggagaagcagagccgggatgtggatccaggcagacaggctttggatcagaaccaccacactattcccctagagatccaccacccagttctcctatagatccccgcgtctgcactcactgaccagcagtgtgggtgagtcacgcatccttcccacgacttggtggatctcagcaaaatggaagggacaaaagcgtctgcctcttagggtattaaaggggttaaatgttaaatgagggaccaggtaatgattgctaatgtttactgagtgccgttatctaccaggcactgtcctacaagctttcaatgaattaactcatcaaatattcataactactgttattatcacccgcatggcacagaggcagaaaccgaggcacagagaggttaagtaacttttcggaggtcacaaagcttacatgtaccagagcaacattccttccaagggagtctgtactctcatccactctgtggtcatcctggctgcccaattatatgagaataaatgtcaggaaaagcagttgctagaacaattacacacaggtctctcttctgccatgagtaggaaaagtactgtgaatctccttgcataaaatatctctagggtttgacctttctgttccccaaatactcaccaaaaatgtattccctaatgacttcagtgttaccaagagcacttccccataaacctgccaagaaaagagcaataaaattcaaacattctccatcacgtgactgtcatgtttgatattcaaagcaccagcagactggcataaagcactgcagggatctgcagcaggaagaaagatctttcttccattccataaatatttatgaagcaattagtgggcacccggcactcttctggctgttggaatagagcagtaaacaagacagataaagtccttgtcctcacgaaccttctatgggtggagccagccgggcactgtagactggctaccccaaggccatttcaagctcctgtccatgccaacccttctcagcacacaggcaggaagggcaaatatttcccagcctcccttgcagctaggggacggtcaagctctggtccatgcacactgctggggggacttctgcaaagtgcttgttctccttctcagaaggagcaggccaggtatggtggcatgcaactctagtctcagctacttgggaggctgaggcaggaagatcacttgaggccaggagttcaagacctgtattgggctatgactgtgcttttgcacggcagcttgagtgacagagagagaccctgacttcaaaaaaaaaaaaaaaagttgcagcttcattggatgcagccgccatcccgtggtgtggaggagttcagcatgagggtgacttaatatgctaaggatggaggagcagaaaatctagaataaacctgggtccttctgcttaatgttgcacagctaaaccaatgtcaccagccacctaactttgtattatttatttattttgagatgggatctcgctctgttgcccaggctggagtgcagtggtgtgatctcggctcactgcaacctctgcctcccagattcaagtgattctcctgcttcagcctcccgactagctgggattacaggcatgcaccaccacgccctgctaatttttgtattttttaagtagagacggggtttcaccatgttggcccgtctggtcttgaactcttgacctcaagtgatctgcccgcctcggcctcccacagtgctgggatttcagctgtgagtcacggtgctcagtctgtctttttcttttgtaagaaaattaatcccacatgtcctcggggcactgtggttggttagtgacttttagccaaacacatttgtatatgatacagggagacataaaaaatgaataatcagccaggcacggtggctcacgcctgtaatgctaacactttgggagactgaggtgggcggatcaattgaagtcaggagtttaaagtcagcctggctaacatggtgaaaccctatctctactaaaaaatacaaaaattagccaggcctggtggtatgcacctatagtcccagctacttgggaggctgaggcaggggaataacttgaacctgggaggttgcagtgagcagagatcacacaactgcactccagcctgggagacagagtgagactccatctcaaaaaaaaaaaaaaaaaaaaaaaaaatagacacacccattaggatggctggtatccaaaaaaccccagaaaacaataagtgttgatgaggacgtggagaaattggaaacctgggacaccattgggcagaatataaaatggtacagccactgtggaaaatggtatggtcgttcctcaaaaaaaaaattttttttttttttgagatagcccaggctggagcgcaatggcgcgatctccgctcactgcagcttccgcctctcgagatcaagagattctcctgcctcagcctcctgagtaactggaattacaggcatgcaccaccatgcccggctaattttgtattttttgtaga[144 bp omitted]catgatccagcaattctacctctgagtatatacccaaaagaattgaaagcagggtctcaaagagatattcatagacccatgtgcatggcaggttccttcacaacagccaaaaggtgaaagcaatccatgtgtccatcgatggatgaattgataagcaaaatgtggtatattcgtacaatggaatatgattcagccataaaaagaaaggaaattcagacacatggtacaacatggatgaacttcgaagtcattttcctcagtgaaatcagacagacacaaaaagacaagcactgcatgattccatttacatgtcatactcagagtagtcaaaatcgtagaggcagaaggtagcattgtggttgtcaggggctaagggagggggtgacagggacttagtattcaatgggcgtagagttccagttttacaagatgaaaagtgttatggagatggatggcagtgatggttgcacaacattatgaatgtattgtatttataccactgtacttgacactttaaaatggttaaaatggcaaattttatgttatgtttattttataataataaataaaaagcaccctggtgtgtgaggggagggataaaatacacgtacagaatcccttcagtaggtgatacatacatctaaggaaataataatgttatagggagtacctgggagtgacaatttcaaaatctctgatgcccaagaccagatttagcaaagagatggtggggataggagacaggagccaggcttggcaatgtgaaggaccccgtctgtccagaccagagaaaaggggaagatccccttcatcctaccttgttctcctcccctgagaacacccctccatctaccaggttgcagaagctggaacctttgatgtcatctctgattctccttactctccacatccaatccaggtgtaattcttcttcatccatctccaggtttccagagtccatccacttccctcccatatccattctggtacccaaccttaaactgccattatctgtcaccaggaccattagcttctcaactgctcccaacttctaagtttacacacccacccctaatccatgctcagagagagagagagagagtgagatgttttaccatataaactgaatcggtcaccaccctaattaaactgcctccctggctctcctatcgcacttggaatccaaactaaacttcatctgtgtccttcagggtcccatatgatctggaccctgcctacctctctagccctctctctcagcctcattcaggaggctccagcctcactggtcttctcattggttctagagtaagacaaacttggtcctggcttagggtctgatatggttaagctttatgtccccacccaaatctctcgagttgtaatccccagatgttgagggagagacctggtgggaggtaatcagatcatgggggcagatccccccatgctgtactcgtgatagcgagtgagttctcacgagatctgatggtttgataagtgttgggcagctcttctttggcttgctcttctctctcctgctaccacttgaagaaggttctttcttccctttcaccttctgccatgattgtaagtttcctgaggcctccccagccatgtgaaactgtgagtcaattaaacctcctttgtctacaaattacccagtctcgggtagtatctttatagtagtatgaaaacggactaatacagggtctctgcatttgctcttccctctgtccatgatgcttttcctctaagatatctgcatggcttcacttttcatcaggtccatgctcaaaggccatctcctgtcagaagctctgaccaccaattaaaaataatactgtagtcactctccagtcccttaccatgaattatttttcaagatagcatttactatgatctgacattataatacatacttatttttgtgtgtgttcattcatcatctccttccctggagtgcaaacttcattagggaatgagccttcactgtcctgctcatgactgaatcccctgcatttaaaatagtatcaggctcctagtgtgtctcaaaagtgtatgctaaaatcatggagagtcaaccatccttaatttcctaccatgtgctggacactgggctgagtgttttatttgtggatcatacctaactctcacacccacattttgaggtaagtactttccctatgagaaaaacgaggctcaggtaacattaatgactttctcaagctggcatggttggtcctatgtaggggagctgtctgcccagcagggtaatgccttcagaccctgaatgctgagaagattatgaagccacaactaaaagtgataccagtgtgtaagctacagtcaaggacatttaatcaagttctgattttactcactatgactgttttgtttttggtttttgttgtaattttttctggaaataccccatttaaaaaaaattgtatgccccttgctttgctggtgcccaaaacacattctagttttttgtttgtttgtttgtttgtttgtttgttttgagacaagatctttctctgtcatccaggctggagtgcagtggggcgatcataactcactgcagccttgaactcccatgctgaagtgatccttccactgcctcagcctcctgagtagctgggaccacaggcacatgccacaatgcctggctaatttttaaatcttgtgtagagacacagtgttgctatgttgccgaggttggtctcaaactcccagtctcaagggatcctcccaggtcagcctcccaaagcaccatgtaatcccaaacacattctgaatctgcttattggaagccacagccctggacttgagcccctctattaagctccctctcctggattgtttgataggatatcaggtatctgccgcattaaggagacctttgagagacactgaagactcagcagaaggaatacaccattcctctttctggaagcctaccaagtccttttctttcccccaagaaatttaagagctgggcaaactagaccctcagaaggaaaattcttgcctctcctccacttcccacccccttttaatcccctctgaccccagcgctgacctctcaggaaagtcaggtctctctcagggtgagttctgaccagtcttcccttcttgaatttgcttccgaagtgggttatggaaacaaaggcccccagtgcagagaagccagcgtggtgaggggtgaactcgaaccaggtctctgcagaggaaatacaacggcaagtgagtcccagcacagaaccaggaatgtagcaggtatgcaggaaaaagaaatctattaatgaggaattacaaccatgacaggagaatgttagagatggactgtgtggtatcagaaaccactggggatctcatcctcagacctgagtctacgctgctggtggcagctcataacttccacagcagcctgtttccaatattttccagagcttgaaccctcagccctgcctctctcttccatctcattgtggctgcaactccatggaatcctggagtgcaagggaagagtgtagccacacgattgcatggaggattgtctgtgggcataaatctaatgcatgattccaatgtgagtcattagaatattccagggaagaaaatgacatgatcagattttcatcctggaaacttccatcaggtagccagggaaggaggtggacagcttgggatgggcgggccagtgaggaactaattacaagagtctcccaggagactgggagacctggtctggggatgatgtagaagagcacaaaggatgaaaatgaggagggggtgatttctaggtctgggaatgactgaatttgtggggcttatggaaaggacggagtcagctgtatctgctctggtgagaaaacagcacaaggatccacaccgaggagagagataaaacattcatggccgggcgtggtggctcacgtctgtaatcccagcactttgggaggcggaggtgagtggatcacctaaggtcaggagttcgagaccagcctgattaacatggtgacaccccatccctactaaaaatacaaaaattagccaggcgtggtggtgcatgcctataatcccagctacttgggaggctgaggcaggagaatcacttgaacctgggaggcagaggttgcagtgagccgagatcgtgccattacactccagcctgggcaacaagagcaaaactctgtctcaaacaaacaaacagacaaacaccattcacactgggggcttctgagccttgagatgccaggagacgcccaaccacaggtaactggtaacattgcctgatgtatcgtgagaacttaccaggacacagttgctgaacaagtgagtgcattttatgcttaggaaatagggtaaggaggtctggatctcaggagagagatgagctcaaaagagaaactggaatgtctggagagctgccagcatttgggtgataatcggacctatg[144 bp omitted]tctactaaaaatacaaaattcgctgggcgtgatggcgcatgcctgtaatcccagctactcgggaggctggggcaggagaatcgcttgaacctgggaggcggaggttgtggtgagccgagatcgtgccattgcactctaacctgggcaacaagagagaaactccgtctcaaaaaaaaaaaaaaaagtgagagacagccccacccacccaccccgccatccttcaaacatcccttattacagttttctttacttttttcttttttctttttttttttttttttttgagacggagtcttgctctgtcgcccaggctggagtgctgtggcgcgatctcagctcactgcaacctccgcctcccgggttcacgccattctcctgcctc[197 bp omitted]tccctcctctcctctgttttcttttttctttcttctttttggggggacagggtctcactttgtcactcaggctgtagtacaatggtgcaatcacagctcaccgaagccttgaattcctgggctccagtgatcctcctgccccagtctcctgggtagattcttcaggttcctgccaccatgcttggctaatttattgtgtttttttgttttgttttgttttttaatgttgttgttttgagatgggatctcactatgttgcccagggtggtctccaacttctggtttcaggcgatcctcccacctcagcctcccaaaccactgggattacaagcgtgagccaccatgttggcctcttaaaggttttcttgatccatgcaaagcaagtgcatgtcctctggtcacttctgggacttccctcttctctcgtctaagctgagcaccctgttttctgcaatcctgagcccttccctcttcctgggctccccaaggggagggcagggaaacattcttccattccactccgtgctgttccatcccttactacctctccctccctctaaatgtttgcttacctggtgctcttgcctcctgccaggaaggttgcaggtcattgtcaatggctgcaaatattgggtagggtagtgtcccttcttccacgggcttcttcatattggacaaatgagactccggcagctttgggagaaggtgccaagacagtgtgagggaggcatgtgggtcccacagggtggaacctctgcacgtaggccacatttttttttagaggggtctcagtctgtcacccaggctggagtgcagtggtacaataatgggccactacagcctcaacctcctgggctcaagcaatccacccacctcaacctcccaagtagctgggactacagatgcatgtcaccatgcccggctaatttattttttgatagagacaggcttttgctatgttgcccaggctggtctcgaactcatggcttcaagcaatcctcccgcctcagccacccaaagtgcttggataggctaggtgctgtggctcatacccataatcccagcactttgggaggctgaggtggaaggatcacttgagcccaggatttggagaccaccccgagcaaaaaagcgaaaccctatctctaaaaaaaaaaaaaaaaaaaaaaaaaaaaaaaaaaaaaaatttgtcaggcccagtggtgcgtgcctgtagtcccagctacttgggaggctgagctgagaggattgcttgagcccaggaggtcaaggctgcagtgagctgtgattgcaccactgcactccagcctggacgacagagtgaaaccctgtctcaagaataaacaaaacaaacaaaaaacaacaaaaacccgatgtgttaggataggctggatgcagtggctcatacacgtaatcccagcacttcgggaggctgagataggaggatcacttgaacccagtagttggaggattgcttgagctcaggagtttgagaccagcctgggcaatatagcaagatccctgtctctacaaaaaaaaaaataattaaaaattagccaggcacgatggtgcatgcctgttgccccagcttactcaaaaggctgaggcaagaggattgcttgagcccaggaggtcgaagctgcagtgagccatgatctcgccactgcactccagcctgggtgacagagcaagaccctgtctcaaaaataaaatgaaataaaataaaatagtgaattcaagacatcaaatggccaagcagagatggagaggaaagttgtcttgggtctgacactttccctatttctgccttattccatcataagtcctcattgttcttcttgccctggatgtctgtgtatctttctagtaaatcatatcactttatttgttgcataaacgaatcagagtcaatttctgtcacttgcaaccacagtaatcctgatatactttagttttgaggcatcaaccgaagtgcccagattttgatgacttgaaaatcctgaaggacttaaaaggtggtgctggtcagcatctttggtaaccccacaccctgagaccccttgctcctacccccaccccaggtccccagctgggaatgacttacttctctggtttgcttagagataaccatgtaggcccagaagtcggtcagagagtaattctcagacctcgctgcttggatggttttctgtaggctcttagccaagtcccactcctgtcgggtaaatcgatgtttcaggtcagcctcgagagcttccatgtcaccatcattggtgtagagagaagatattgccctggaggacagaggaagagagtgagttgggcattttaagtgtggacgatgaagactggggaaagatgtgtgcaaggaggtccttcacaggaacacctgcctcatggagagggcgacacacagaggaaacggaaaatttccattaaataaatacaactgcagaacgatcaagttcgaaggaggactcaaaatcatctgggacaatccttccatttcacaggcaggaaaatgagagcacgatgggagaaaggcctcatcagagtcaaatgttttttgcagccagcacttattaaaaggtttatatgtgacagcaacaaactgtctttagtcttttatacctattaactcacataatcctagaaaatcaatgaacggggccaggtgtggtggttcatgcatgtaatcccagcactttgggaggacgaggcgggaggattgcctgaggtcaggagttcgagaccagcctggccaacatggtgaaaccccgtctccactaaaaatacagaaaaattagccaggcgtggtggcatgcgtggtggtgggtacctctagtgccggatactcaggaaaccctgtctctactaaaaacacaaaaattagccaggcatggtggcacacgcctgtggtcccagctgctcaggaggctgaagca[298 bp omitted]aggctgaggcaggagaatggcgtgaacccgggaggctgagcttgcagtgagccgagatcgcgccactgcactccagcctgggcaacagagcaagactctatctcaaaaagaaaaaaaaaaagaaaaaaaagactttatattcatttgttcactcaataaatatatattatatatattaatttataaagaaaagaggtttatttagctcacagttctgcaggctgtacaagaagcatggtgcaaaaagcttctactcatggcagaaggcaagggagctggtgtgtcacatagagtctatatatatatatatatatatatttttttttttttttttgagacaggtcttgctctgttgcccagactagagtgcagtggcatgatcttggctcactgcagtctcaaacccccaggctcaaatgatcctcccacctcagcctcccaagtagctgggaccactacccaccaggtgcatcaccatgccctgctcatttttaaatttattttctgtagagatggagtctcactatgttgcccacgctggtctcaaacttgtggcctgaagcaatcctcccacctcagcttcccaaaatgctgggattataggtgtgagccaccgtgcccgggctcaataaaaatttttgatgttcttaatgctgcttatcgggtgctatctaccctcacaccatccaatgtattaaacatacatcatagctcttgagcccctgaagtgtggctagcatgatttaaaatatttatttcattttaattagcttaaatttaaacactggtactccattcagttattgggaaactctgaagtatgtttggaacaagctgggtatgaaaagttctttcctttaatatctttttttttttttttttgagatggagtttcactcttgtcacccaggctgaagtacagtggttcgagctcggctcactgcaacctctgcctcccggattcaagtgattctccttcctcagcctcccaagtagctgggattacaggtgcgtgccaccacacccagctaatttttgtatttttagtagagacagggtttcaccgtgttggccaggctggtctcaaactcctgacctcaggtgatccacctgcctcggcctcttgaagtgctgggattacaggtgtgagccactgccccgggcctcctttaacatctaatgagacttctgcatccaacttggaatgcgctcagtataaaacgcccagcagctttcaaagacctagtctgacaaaaggaatgtcaaatatctcattaacaatttttttcttaacgatgtgtcaaaatgctaatgttttggatatattgggttaaagaaaatggatcatttcactgtttctttttaccttcttgaagaggctactagaaaatttaaaatgggccggacatggtggcttacacctgtaattccagcactttgggaagccagggcaggcagatcacctgaggtcagaagtttgagaccagcctggccaacacggggaaactccgtctctactaaaaatacaaaaattagctgggcatggtggcacgcgtctgtaatcccagctaactgggaggc[133 bp omitted]aaaatttaaaatgatagaatagatgtggctcatgttacatagctctacttgatagctcaggttgggacgatttgcatgtgtttcatcatttaattctcaaacagccctgtgagatcagcacagtttgttgctgtcacatgtaaacctttaataaatgctggctgcaaaaaacatttgactctgatgaggcctttctcccatcgtgctctcattttcctgcctgtgaaatggaaggactgtcccagatgattttgagtgctcctttgaacttgaccgttctgcagttatatttatttcatgtaaattttccatttcctctgtgtgtcgccctctccatgaggcaggcgttcctgtgaaggacctcctcacacacatcctttcccagtcttcatcgtccacacttacaatgctcaacagcggaggaaaccaaggcacaaagaagtatgtctgggctcgtaacagcccacaaaggacagctccaggaactaacccaaagctgttgaaatataaggctttcgttgttgttgtttgtagagatggggtcttgctatgttgcccaggctggtcttgaactcctgggctcaagagatcctcccacctcgacctcccaaagtactgggattacaggtgtgagtccctgtgtccagccaggcctgcctttttaaccacagcagtctcggaaagattccagaagaaatcatggggttcctatctcaatagcgccccctggagttctgcaatgtgcagtacagctaaacccccacgccatgtcactcaacatgttagatgagccttggaggaatagaggggtccggtgtgactctgcaggacctttcccactcccaagctctgcagctctgctcttcatgctgtcgcctccaggaacctcatcctccacatccagctcagaacccagctccagatcaaactttgagcacagaaatgaaaacaaatcaggccagccaggctcaacattcatgcctctgccctgcctatctcacactcgagcctctgctgctctgcctagccttacctcctgctctgaaaatgtgccaagatcgattagtcatgtctgccctgggcttggcaacaaacatgcagacatgagtgtttcatacctgccatctggggcctcctgaatgagacagtcctacacggattaatgcaatactttatcatagaggctgataagttaaaagggctgtattctatccacctgcagtgtgaaaagtgcacctgaacatgtaaatcctcctttaatgtcagaaggtagtattattatgctttgtccatggctttgtgtagcaaagaaagatacttggtgttttcccctgcttcctggtgcagagttcctaaaacccttggaattttcttttttagaaaaaaaaaattttttttttgagacagggtctctctgtcacccaggctggtgtgcagtggtgtgattgtagctcaatgcagcctcagcctcccaggctaaagcaatcctcctgcctcaacttcctgagtagctgggaccataggcatgcaccaccacgcctggctaattttttcactttttgtagagatggggtcttgctatgttgccccgcctgggtctcaaactcctagactcaagcgatcttcctgcctcagcctcccaaagttctgggattacaggcgtgagccaccacacctggcccatcttttgtaatacaccagcaattgtaagtaaagtgtgttcctgagttctgtgagctattccagtaaattattgaacatgaggcggaagctgtgggaaaccccaaactattgccagtcggtcagaagcaccagcggctaggtaattgcaactcgtgtctgaagtgggagcagttttttgggactgagcccctttcacctgtggaatctgatgtgaactccaggtagccagcgtcagaattgctcagaattgtaggacacccagctagtaccagagagctcgagaagcagcgttggaaaaaaccacacacatttggtgtcaggaggaaaaaaataatcccatttatgtgtcagaaagcaatctgaaacatgagtgatgcttaccaagtggatccagagacccctgcgaggtacgtgacggcatccaacaggccctgttctttcatctcactcaggaccccaaggcaggcaatgtgagcccgcagtcctccgcctgagcccagcacagcaacaactggggcctaggcattggggagaaaatcgatcagaggtttagagcctgaggatggaggtgggaacaagaagaagggtacctggggccgggcaccgtggctcacgcctgtaatcccagcacattgggaggccgaggcaggtggatcacttgaggtcaggagttcaagaccaacctggtcaatgtggtaaaaccccatctctactaaaaatacaaaaattagctgggtgtggtggcacacacctgtaatcccagctgctcagcaggctgatgcaggggaatagcttgaacctgggaggtggaggttgcagtgagccaagatcatgccactgcattccagcctgggtgacagagcgagacgttgtctcaaaaaaaaaaaaaaaaaaaaaagaaagaaaagaaaagaaaaagaaaggaggaggaggagaaggaggagacctaggatctcccttaggcaggggcaatgcctgtcccatagaagttcatatccttctatttctatcccatagaagttcatatccttcggtccagctctccctggctgagttgggccctggacactgggcacagagggggcgattctgggatctctggggccaccctcctcccctcacttacctcatcagcctcaatccttagcttcttcagagctttcagcacatgaagtcttcgtctctccacggccgccttttcttctttctggagcccaggaattatggaaacttcagagcttcccaggagaaaacacaaagaagtccagaaaattcacagggaaaagggataaaacacagaatttgacctagaactgggctgtccaagcaggtagccaccagcccacgggtacatggtttccttttggggtgaggaaaatattctgaaactagatagaggtgatggttgtacaacactgtgaatgcattgaatgccagtcaattattcacttttcaaaatggttaattttggggccagacgcggtggctcacacctgtaatcccagcactttgggagggtgaggtgggtggatcacttgagcccaggagttcaagaccagcctggccaacatggtgacatacctccctccctccctccctccctccccttccctcccctccctccctccctcccttccttccatccttccttccttcctccttccttccttccctccttctttccctccctccctccctccctccctccctccctccctccctccctccctccctccctcccttctttctttctttctttctttctttctttctttctttctttctttctctttctctctctcttttttgagacagagtctcgctctgttgcccaggctggagtgcagtggcgcaatctcagttcactgcaacctccacctccccggttcaacaataagacagggtcttgctctgttgcccaccaccagtgcggtggtgcaatcatagcttactgcagccttgaacaccgggactcaagtgatcctcatgtctcagcctcctaagtagcttggactacaggtgtgtaccactatgcttggctaatttttaaaaatattttcttttattgtagagatagggtttcaccatgttgcccaggctagtctcgaactctggggctcaagagatcttcttgcctcggccaccaaaagtgctggggttacaggcatgggccaccatgcccaaccttcagctctttccatctatctccaccaagcgagaggaactgtcacagccctcacctcttgacactcactatgcattccattacacaaatgctctgcttccccatagtggtcagctctaagaggacttaccttcccatggtgcactgcggtcagaaaattctcagtcctcctgccaaagaaatggctcttcttagtcctgtgcccactgttgggcttagcaaagacagtgggggagggctgggactgtcacgggctcatgggttctccttgtccactgcccagacaaaaccaatgcgaacagcaggtgttgcagcaaagagagagagtttaataatctcaggggcggccaagcgaggagaatgggagaaatatttcaagcgcgtctctctgaaaatttggaggctagggtttttcctcgctctttctctttctctgcctctgtctctgtctctgtctgtctctctctctttagatgaagtttccctcttgttgaccaggctggagtgcattggcatgatctcggctcactgcatcctccgcctcccgggttcaagcgattctcctgcctcagcctcctgagtatctgggattacaggcatgcaccaccatgcccggctaatttttgtatttttagtagagatggggtttctccatgttggccaggctgggcttgaactcccgacctcaggtgatccacccgccttggcctcccaaagtgctgggattacaggcacgagccaccgcgtccgacctgagactagggttttttaaggaaactttggtgggcaaggggctgagggaacaattgatcggctatggatgaaatcacaggtgtgtccaaaactatctttgtatagctgagtcagttcctgggagcgggtctcaggaccaggtggtagctcttggtctgccaaaatgctcactctgaaaactatctcaaagacaatttctttt[133 bp omitted]tgtcatgcccgaatagggccactagagggccccttggtcttggggtaacgccagcgtctgggaagatgcccattgcctagcggaccttggtctagcggttgcgtcagtgcctagagaccaggaaagggagtctccctttccccgggggagttagggaagactctgctccaccgcctcctgtggagggcctgagtgatgtcaggcccgcccgcagttatccagaggcctgaccatctccctgtgatgctgtgcttcagtggtcacactcctgtttcactttcctgttccactctgtatacctggctgcaccctctagatagcagtagcagaattagtgaaagtattaaaatattaaagtctttgatctttctgaaaagaacataaaagaaataatgacataagctatcctctctctctacgccttggctacctaacatagaagggctccctgtccagtggacacgtgactcacatgaccttatcaatcattggagatgactcacactccttactctgccccttattatccaataaataacagcgcagccaggcatttggggccactatcggtctctgcgtcttggtggtagtggtcccccaggcccagctgtcttttcttctatctctttgtcttgtgtttttatttctacgatctctcgtctccgcacatggggagaaagacccacagaccctgcagggctggtccctacagtggcgcaatcatagctcactgcagcctccaactcttgggctcaagcaatcctcctgccttggcctcctgggttgctgggactacaggcatgcaccaccacgtctggcaaagttttaatttttttgtagagattgaggtctcactatgttgcccaggctggtctcattctcccgggctcatgcaatcctcctgcctcagcctcccaagaagtggggattacaggtgttagctaccacaccccactaaaaagctgagttctgtgtttcacgacagtgatattatttatagaagtagctggggaagttataaatcatgcgacccctggttacgtgactctggagcacatatagaaaaggaagctaagggatggcaggtcattcttcaacccacgactgttctttagcaaagttccagcaccttcatgattctaaccttgtcttatgaatgtgacttcaggccaggcacagtggctcatggctgtaatcccagcaccttaagaggccgaggtgggaggatcacttgaggtcaggagttggagaccagcctggccaacatggtgaaaccttatctctactaaaagtacaaaagtcacctgggcatgatggcgggcgcctgtaatcccagctactcaggaggctgagggaggagaatcacttgaactcaggaggtggaggtgccagtgagcagagatcatgccattgcactccagtctgggcaacaagagtgaaactctgtctcaaaactaaataaataaataaaaagtaaatgaatgtggcttcaatctctcaacaaggactgggggtcagttttctttgtctcaaagtttaactatgaattaaattcctctcatggtaattttggcctctgcactagaataagaaaaaaaaatctagcctgtgaggttagaaacaagatggtcagtcatgttagctttctctcattacttacatttctgcgaaggcagtttcaagaccccccttatgaaattaatcagcttccccccaccacctccaaattcatatgttggacttgtaacccccagaacctcagaatgtgactgtatttggacataggattctttttcgttgtttgctttttgagacagggtcttgctttgtcacccaggctggagtgcagtggtgtgatcgtggctcactgcagcctcagcctcctgggctcaagcgagcctctcacctcagcctcccgagtagctggaagtgcaggtacatgctaccatctccagctaaattttttatgttttgtagagatcaggtcttgttatgtcacccaggctggtcttgaactcctaggctcaagagagctttccaccttggcttcccaaaacgctgggattataggcatgagtcatcgcactcggccagacataggctcttaaaggggtgactaagttaaagtggggtcctgagggtggcctggaatttggtttgattggtttattttattttatttttttttgagatggagtctcgctttgtgccctaggctggagtgcagtggcgcagtctcggctcactgcaagctccgccttccgggctcacgccattctcctgcctcagcctccggagtagctgggactacaggcgcccgccaccacgcccagctaattttttgtatttttagttgagacggggtttcactgtgttagccaggatgatctcgatctcctgacctcaggatccgcccgcctcgtcttcccaaagggctgggattacaggcgtgagccaccgcgcccagcctgattggttttataaggagagattagggcctctgcaagaggcttcaggagaaaccaaccctgccaacaccttgat[134 bp omitted]caacatggtgaaaccccatctctactaaaaatacaaaaattagccgggtgtggtggtgtgcgcctgtaatcccagctactcgggaggttgaggcaggagaatcgcttgaaccccggaggcggagcttgccgtgagccgagatcgcgtcactgcactccagcctaggcgacagagcgagatgctgtctcaaaaaaaaataaataaataaataaaataaaataaaataaaaaagaaaaagaaatcctgttatttaattgcacccaatccctggtacttggttatggccgccccagcgggatgaaacagccctccctgcccccacggcttgcctgagcctgggtctggggcgtgtgcgcatgcgcggtggagcttgtgctccggaatccggtgcggaggcttgggctccctgcgcttagcggtgtagtcgctggacagctccttcagccggaatctccgcgggtgaagactgcggggatcctcggtgccaaagcttctgtggtcctcctgctttccttttccccctgtgggaggaggtcgcgggctggaggtgtttcctcctggtcctgagcagggccaacctggaggtaaaatggcccctgcgcctttaaacagccctcctcggcttgtaggccctgcttggttgctccagctttttcagctgttccagagctcacccggagctattttcatccgtgggatcacgtggagggctgggactttccaggcttccttagtgatgtcacccttctgtcattaggcacccgagaccagtattcaaaaaaagaatgttgtcgttatataactatattggagataagtattcctcaaaacagattagctaatcctcctatgcatctggctgtctaataaccatcatatataatatcatactcaaatacccagaaaaagaaatattgaggccaggcgtggtggcttacgcctgtaatcctagcactttgggaggctgaggcaggcggatcatgtgaagtcaggagttcgagaccagcctggccaacatggtgaaacaccttctctactaaaaatacaaaaattagctcggtatggtggcgtgtgcctgtaatcccagctactactcgggaggctgaggcaggtgcttcatcctgggaggtggaggttgcagtgagccagatccttagggccaactctggttcatttaatgtccatttttagaaaacctgtgagctccattcacagtgaaggtttgaagcccagaagtggcctcccaacagggtaccacatttcccagcacctttgcagctaggtgtggtcatgtgagcgagttatgtggtcatgtgaccgagttccagtcagtgcaatcgggcatctgtggggagcaccgcttccaagagtggctcctagaaacctcccatactaccctcctgcctactcttcctgaagcccagcactaagcgtcatcccaactcgatgggttttgaattttttttttttttttttgagatggagtcttactctttgtcgcccaggctggtgtgcagtggtgcaatctcggctcactgcaacctccgtctcctgggttcaagcgattctcctacctcagcctcccgagtagctgggaacataggcatctgccaccacgcccggctaattatttttgtatttttagtagagacagggtttcaccatgttggccaggctggctcgaactgctgaactcaagtgatccacctgcctcggcttcccaaagtgctgggattacagttgcgagccaccgcacccagcttgaattcttattttttaaaaatagatatgaggccataatcctagcactttgggaggccaaggcaggagtatcaccaattttagaacaggatttcaccagggggaagatggtctcccctgctccccctaacgccaggctcacctcttcagtgcccgcaactccaaccatcgcaggatcttttcactcctagacctgaccatgccactgccccgcctgcgggataaggttctacacctcgcaggagctcatgaggctctccacagtatagttagtagttatagatgcagggtcaaggagctgacagcatggaccaaaccctggcccaccacttcctagatagtggacctagggaaggtaacttacatccctgtgcccctcagtgtcctcacctgttaaatggggagaataaaagtacctacctggtggagccatcatgagggtcactgaggagtgaggatgaccctgactagcttcagcagagggacatggcggccgtgtgtggcagatgtgttcctggggccctgcactggtgcagggaggaagagccaagcccaaaggaaccatggtctccacacaaagccagtaatgtggggatcccctgacatacaacatttactttttttttttgccttaaacattttatttgaaattgaaacacaaatgcacactaatttgccagttctttaaggcagagctgtatcaggaactcttagctatgagaaacaagtcttttttttttttttttttttttttgagacggagttttgctcttgttgcccaggctggagtgcaatggctcgatctcggctcactgcaacctcctcctcccgggttcaagcgattctcctgcctcaacctcctgagtagctgggagtaacaggcatgtgccactacgcccggctaattttgtatttttagtggagacggggtttctccatgttggtcaggctggtcttgaactcccgacctcaggtgatctgcccgcctcggcctcccgaagtgctgggatgacaggcatgagccactgtgcccggctgaaagccatgttttagagtggcataatcgccctggggcttattcttcccctactcccatgaacaaaagcccacagttaggcagctgctgccctaggttcgccggtttagggtcgtcaggagagtttgttactctttttcctcatcattacaaggtggtgacttggctccagccatcatctctagtcaaggcaggaggaggggaggagctgccacaaccagggctgtcctttttggtcaggaaagatgtttctccagaagtccccagcagcccctgtgcttatgtcccctgggtctgcccacacagggctacagggccactgctagccccaaggagactcggaaggcaatgttgtcttcttgggctacaacaaatagaaacagaatgcccaagagattgtgtgcacaagagaccatgatggagacacaggaagagagacagggaggctgagtcacagtgacagacagcaaagtaagcctggcacagacttgcacggcagagagcaaagcctcgcagatagagaaggaaggggagagagggcgggtgggagacaagggcagaggaacctgatgagagagaagggaaggagggagggcagatgtgagaggcagaaacagagtgtgaggggcaggggacagctgggagccctgtgtcccccctgcgggagtatcaggacaccctgacactctcatgcccggaagctcctgttccacgctgggccccggggttagaggcctcctgctctggaagacccgagcctgggccccgctccgcgtgcagccgttttccccaagccagccccgtggtgcccagggctgggtgggtgttccaggcatcctgcttgccttgtctgaccatttcccgatggttttcctctaacatatcatcccatgtggggtggctgcaataataacagcccccatagatatccaggtcttaatcgctgaaacctttgatgtgacctattttttttttttttttgagatggagtctcgctctgtcgcccaggctggaatgcagtggcacgatctcgggtcactgcaacctgtctcccagattcaagtgatcctcctgcctcaccccactagtagctgggattacaggcacgcgccaccatgcccagctaatttttgtatttttagtagagacggggttttgccatgttggccaggctggtctcgaactcctgacctcaggtgatccacctgcctcagcctcccaaagtgctgggattacatgcgtgagccaccgcgcctggcccttttacatttttattaattttattaataaaattagaggagatgaagtctggctgtgttggacaagctagtcttgaactcctggcttcaagtgatcctcccacctcagcctccccaagtcctccccaaggcgtgagccactgtgcctggcctctgtgaatgtgtgatcttatgtgactaaagggactttgggattgagttaggatcctgaaatgagattatcctggatcatccagggggccctaaatgtaaccacttgagtacttggaagagagaaacagagatctgatggaggagaggacgtgacctgatgacctcaggagagagatttgcaggtgcgatgctgctggctttgaggacggaggaagaagccatgagcctaggaaccaggtggcctctggaagctggaaaaaggacacagtttctctcctggagctcccagaaggaaccggccctgccaccactttgatgttagcccagtaaaactgattttgaacttctgacctccgaaactgtttagggaatacatctgtgttattttaagacactgcatttgtcttccttaacagggctcacgatggtgcctccctgtgggatggctggaaggttaaacaagttaaaaaatatatgtatgtaaagattttagactactgctgtccaatacaattaaataaaatatttggtatggctgggtgtggtggctcacgcctgtaatcccagcacttaggggggctgaggagggtggatcgcttgaggccaagagttcaagatcagcctggccaacatggcgaaaccccatctctactaaaaatacaaaaattagccaggcgtggtgtcacattcctgtaatcccagctacatgggaggctgaggcaagagaatcacttgaacccggaaggtggaggttgcagtgagctgagatctcatcatcgcactccagcctgggcaacagagcgagactctgtctcaaaacaaaatcaaaacaaaacaaaacaaaacaaattcgcatcctctgtcatgctggccacctgtcaagggctcgggcattgcaggtggccagtggcggtcacactgcacagagcagatagagaagacgcccaccactgcaggcagttccatggctggcactggctctggcagttcctaggccatggctacatggctacatgctatgcaggtgacacccatgacagctttgcccccagagcccagcacagaccctgtcacaaagtagctatccaataattatttattgaaagaaatgacgggatgaatcccagactccggagtaagccaccccctcacacacacacccctcccctgactctcaaaatccacagcctgccacagcagatttgctaaaaagcaaaggcaataataaccctggggtccgtccaactcatgccctgtacccaggccctaggagggcgagggcttagtaggtatcttcagggtcagagcctgagtcctcgccttgttggttctgaatctgactttgcttccggtacaaacaggccacctgcggagagagggtgggacggggtggtcagaagctccctggctgctcccacctccacaaggttccagagaggccaccacgctaaaaagctggtagggccaagcagctgggcggcccacccctgcttcccaggacctcacctgagcactggtggtggcctgctccggctgcttgtcttcacggactcgaataaaccgagggaagcgaagggagatgcccttgtcactatccacctgcggaagcgggatggagactcctgcggtccagccccagcgaccccctgctcagtctcctccctcctccactctggactgtttcctgatccacatgacggggccgaacgatgggttgtcataaggattaaacaagttgacaaagtgcttggaacagtacccgggca[156 bp omitted]aaaagaaattagccaggtgtggtggcgggcgcctgtagtcccagctactcaggaagctgaggcaggagaatggcgtgaatccgggaggtggggagcttgcagtgagctgagattgcgccactgtactccagcctgggtgacagagcgagactccaactcaaaaaaaaaaaaaaaaaaatgccacctgctacagccgttacgataatgacggtaattcgggctgagaggctgaactacggcgccagggtatgggttctagaatctgactgtgggattccaatcccagctcccaactctcaggagccgcgtgatgcaggggcagttactcaggctctctagggctctacatcctcaccgtaaaatggagatgtttgtgtcactacgtcttacggattttgagaggattaaatgagtgtctatgagtgacacgctgatgaccacacagtgcccactgcacagcaagggctggatacacaccggctcctgtgccttgttactaagggtccctggctgtctaacgtgcagcatggtaaaacatttt[131 bp omitted]accccgtctctacaggcacgggtcaccatacccagctaatttttctattttttggtagaggtggggtttc[133 bp omitted]tcttttctttttttgagacagagtcttgctttgtcacccaggatggagtacagtggtgtgatctcggctcactgcaacctccgcctcccaggttcaagcgattctcctgcctcagcctcctgggtagctgggactacaggcacccgccatcacacatggctaatttttgtatttttggtagagatggggtttcaccatgttggccaggctggccttgaactcctgacctcaagtgatctgcctgcctcggtctcccaaagtgctgggattacaggcacgagcccccatgcccggcccatttttaaagaaaaaatgttttgatctttttatctgacactcaaataaaatgcaagctcatcttcctgatccttacctggaagagcagatgtgagccaaggtcccctccctactctgctctctgtgtgcccgcccagaatcccacacagggccacggccaggtcctctgccactcaccaggccccgcgcagcagggtagatgggagagagggagaggtcagcgcacttcacctcccacacagcgctggggtccagccagtggtcgggaatcacagcgccatctatccgcacgtaagggcgtgggctgggcagcaccagcgcctgcagtgagcagaggaagagaggaacagagggtctggaatctcaaagtcaaggccaagtgttggagggctggggagagggaggaagggaaaaaaacaggcacccccttgaagtaaacagaaataggaagtgaaataagggaaaagaaacaagacacccccttgaagtaaacagaaatagaaagagaaacagaaagtgaaagaagggaaaagaaacaagacccccttgaagtaaaaagttgagaaaggtgggagttgggaggaatgggagatggaaagaaatgaaaggccctgggggctgaggcaggacattaaagacaaaaagaggcagagaaagggccagagacctggaggaaggagacagagacacagtgggacagggacagagatgtagagagagagggcaatggagagagagaaccaaagagtgggacagagatggtgtcagggtccgtgtgtccccacccacatcttgtcttgaatcatagctcccaaaatccccatgtgtcgtggagggacctggtgggaggtaactgaacgatgggggcaggtttttcccgtgctgttctcgtgatagtgaggaagtctcacgagatctgacggctttataaagggcagttcccctgcacacgctctcttgcctggcgccatgtaagatgtgcctttgctcctctttcgccttctgccatgactgtgaggcctcc[135 bp omitted]cctctgcatcctgggttcaagcaattcttctgcctcagcctcccaagtagctgggaccacaggcatgcgccaccacgcccggcaagtcttgggttatttcttcatagcagtatgagtatgaaaataaactaatacagatccaatatgtaggacagacactcatgcctgaaatgcctgtgaccatgacaacattcattcacattgatcagggctcacaggcacttcacaaggagcagctatggcacctgctgtgtcctttggctaacccctggtgtgaatgaggcacagggcttggggaggtgaggctgcttgagcagggtcaccagctagtagccggcagtgctgagacatgaacctggagatgctggactccaaagccagctccactgcctgctgccctcctgcccacacctggagccccaagatggtggaagccaagagccctgcatggaaggactgtgctgtcaggggcaggggggagaggggtggaggctgaggcgcagccgccatggctcaccttgaggctctggtgatgctcctccagctcctcatcactgaagccagttccaagctgcagggaggaagcgggaggtcagaggctcagccagccacaggcccagcacttgctcctgccatctaaagctgtgtacactcatggcccccaccccactctggtctacgcagtatccacagaaaaccagggaagtagggagctgggggtgcggagcatccatccagagactcccgggtgggaatgttctcccagcaggcctgccgtgaaccactccctgtcttctgctttatggagaaactcttgctgcttccactgtctccctggccccaggaagtcactcccttatgc[132 bp omitted]ctgcaacctccacctcctgggctcaagcaatcctcctgcctcagcctcccaagtagctgggaccacaggcatgcaccaccacgcctggctaattttttaaaaaagtttttgtagaggtggggtctcactatg[132 bp omitted]acctaccaaaataggaaaggctaaaaattagcagtaatgctggatgctggcagatacgcagcaagtgggcaataatcaccaatataaacgtcacctggaaagccccttttgcattgagagtcttaaggattctttttgccttttgtcctgacaatagctcatttaaaaatctattctaaataatgcaaaatggtgacaatgtagattggtggccaaaacatttgtgatttataaaagtcacttctgtcactgatcgtttaggttaacggacactaagtaatcacattacccatcagaacaaagccggcaacaacttccccacacagccacggggagctggttcaggacacagcactatgtgctatggggcacagcacttgaaaactcttgtgcgggcattcaggtcctgttgccatattgcttaagggcatatacaacactgaaaacaaagtacttccagggtaaaaaggcagaaaagaaaattactcatagagaaggatcacaactttgcaaaaatgtaaataaaacattccctcaaatgtcactactgcgtgtctctgggtggtacgattctaggtgatattttgttctgtttctgtggcaaaagacccaaatttgttggagaggggaatataggaaatacgtaagaaaatctagtccaaaatgtgcacagctttaagaaaaactttaacttgaaaaaaagtaaatcactttacatttcccagaattccttgcagctaggggtgagccatggagcaaagtgatgagcaacagaacttgagcagaaggtgttcactggctgaggctgactcagggtccaaccccctttgctcttccctggtgcgtggagcaggcatggccatgagggctggaactcctgcagccacattgtgatgatgaggccagaggcacatggcagaaaaaaaaaatgtggggacaaaaaaaaatgtggggagaggaggaacctgaatccctaatggcatcagactgccccctccacacttctcatttcataacaaaaaaattcttttcttatgtgagccaccactatttgtagctaatctcaatctctcactgacacacattcctgacatctttctatcccagcctgtttttctatatgaagcaagagttgctcatagaaccagaaaaagtaaataaaaactggggagaacggatccttcacagggggatgtgagcacccctcggtctgggttgtgcaataggaaatacccccgggagtctaatctccttccctcctgcttctgccatcagccccagttccccaggaccttgcatatggcctgcagctcctcactgtcctcgtcgtaggaggccagcaggaagcccccgtaccggccggcccgcttcccccggcccaggtaggcgccgatcaccaccaggtccagggtgtcacccacgccatcaaggtagtccttcttcagctgggagaaggggaggcaagagatgagaagggggagcgcccaaggcggggccctcactgctggggaggggctcctcagtggactgaggagggactagaagtaagtctgaagggaacttccagaaggaaccccaaggatggcccctgggaagagactggacatgggaagggtttctaggtttaaataagaacaaatggggccgggcacggtggctcatgcctgtaatcccagcattttgggaggccgaggcgggtggatcacctgaggtcgggagttcgagaccagtctgaccaacatggagaaaccccgtctctattaaaaatacaaaattagccgggcgtggtggcgtgtgcctgtaatcccagctacttgggaggctgaggcaggggaatcgcttgaacccgggaggcggaggttgcagtgagccaagatcgtgccattgcactccagcctgggcaatgagagtgaaactccgtcttaaaataaataaataaataaataagaacaaatgggaaacgcaggcgggatcgatgggacctcaggagtcagccttgccgccgtctttccctcaggacagagacgtggccaactcactctggccactcctccaaagggagagcattttcccattcgttcagaaacgttcactaagtgctaaccatgtgccaggcagaagctcagccctgggggcacaacagtgctatttcctgagacaggaaaggtctgtgctggagggaaaccagccacagacagacataagtacacaggaagagctagtcagcaggcctggccggctcagtgccacaatgcctcccgctccagtccccttgtccacccctcactgcccctctccactcaaacatccatcaactcttactgatgacaggctcctgctcgctggccctcaacacacccgtcctccactcgaggggaaaccccaggagcttcgcacaatgacaacctgtgactcccggcacggaacccccactgacttcctgaaaccttcaagaggaagatccagttttatctcacagtggccccaggtgctgcctcatctggggcctgctccccactctgagctcacctcccgcctcgcctgcccttgctccctgcacacgcagaggctgctcctccctcagggtctctgcaccgggggttttcctccctagtgctctgtccctcactttgggaaagactcttcctgatcatccggggcactcccagccccgccttgctggcccggagctgacttgcttttcttcatggcgcccactcctgcctgactttctcttattcatgtcctggcttaattcctgcccaagagcctggcccgacacgggcggcaggctcaggagagagacacctcatcacgctgcacctcgtgggatgtgcggtgcttgggctggggctgttctccatcagaactcgtgagcaagggctcgcagcagggagaaggtctgaactcagttgcagcagggggctggggtgggattgtgaaaaggggccctgagctcagacagggtacacagtggaggctcgaaatccactgcctagctgggacagacctccagacccggggtggagaaggcccagttgggggtcgagaatcaccttgagccagttgtgcgatctcttggcgatctcgtaggtggcatcaacatccagggtcttcaccatcagcccctcgcaggagtctgagggagacacagaagcgtggtccttgggaagccctggctcacaagcgccggagcaggcaggattctggtcaaacggtccaggactggggacaggctgggaggccggggtcagcgcaagctgcagacctcaggagagaaaagtgagcaccctcacctttcactgactgctccaggaactcggcgatctgctcgatgtccttggtgtccagggaggtggcgaagacaaactcgccctctgtctccacaaagttctcccggagcagctgccggcgccgggaaaggggctcacgtaccagggactgcagggccggcagggagaagagagatgagacatctttgtgagaataaagacaataagccctaaatgtgaggcgaacaggacatgtgcgggtcacaactagtgacagggttcgtggaaagccttgagagggaagaaccctgatgtcagaaggattctgagagcttaaagcatggggctagtcactggcaagagggcccgacaccatttagagtcggtgacttcaggagcatcagacggggggctgcggccttgctggagcttgaattaacactttacgggcatctcatcagttttgttttttgtttttgtttttttgagacggaatctcgctctgtcgcccaggctggagtgcggtggtgcgatcttggctgactgcagcctccgcctcctgaattcaagcgactgtcttgcgtcggcctcccgagtagctgggactacaggtgcacatcacaagagatccacccacctcagcctcccaaagtgttgggattacaggcgtgagccactgcatccagcctcatccccaagataattaaaaaaaaaaaaaaaagtcctcctttccttagaattccaaaagttttcactgagtttttccagcacatttacagttttgtgttttgctttgaaatcagttccagctggaccttgcaagagtgtgtgtcagagaggaaggaggtgatctgagtgtttttaaacaaaggacaaagcagttgtctccacatgtcaacactgactaatccgtcttgtggctttgaattgcttttctcttttgttcgatcggtccccacccacgcgcagtgtttctggtctgccctttgctcagggcttctctgtgatgatgttaaactaccttcaccacttgccctccagggggacattcacgtgttttccatggacagcttttttctgttgtaaaattgtgctcatgaacattttgtatgaaaagatgagagagaggagccacaagggttaagcaggtacaatttatctggggtcagaccatttcaggtttacatcccagccacacgcttcctagctggtgacttcaggcaagcgtttccctctgtgtacctcagagctcccatctgtaaaatgcagcaatacctactcagggcacgtctgggaagatcagctgagcccgtgctacccagtgtagccgccaccagccatgtgtagcaattgagcccttgaaatgtagcaagttcaatcggagatgtgccaagggcaaaacagtcactggctttagaagacttaatccaagaaaagagtgtaaaattccatgttaataatttcttatattcatcacacattgaaaggataatatcttagacattggattaaagaaaatatgattttatctgtttcttcttaccttttaatatggctactagaagctctaaaattagaaatgtaggctactgcagtggctcatgcctgtaatctcagcgctttggaaagcggaggtgggtggatcacctgaggtcaggagttcaacatcagcctggccaacatggtgaaaccccgactctactaaaaatgcacaaattagctgggtgtggtggtgggtgcctgtaatcccagctacttgggaggctgacgcaggagaatcacttgaacgccagaggcggaggctgcagtgagccaagatcacaccactgcactccagcctgggcgacagagactgtgtctcaaaaaaaaaaaaaaaatcatggggatgaggacacattaaacagaaaaaaaatgatatacttgactacataaaaatagttcatccatgttcaactactactaataaaaaaatttgtaaaagtaatagctcaaacaagtcctatacaacaaaataggccatcaataaattttaaagaaggaatatttgaaggaatgagaagaaatatttgaaatgctcatgggagacaaaggaaccagctgagcagggatgatcaaatcctgcagaaaaacccacaaagtatccagtgtttggaaagcacctgatacttgactttcctctccccagacatcacgggaaacaaaaatcagactctgactgtcttcctacagtaatttcatgtagtgaaacatcagtctgcatcatgaaattgggggtttgagcatcaaaggcatctctgcattagaaccactaccagctccacctgtcccggcgaaggacagatgggcctaacggagaaaaaacgtttacagaccaggaagacatgagtgagaacccaccagacaggcaggcaaaagacacgcggaggcaagtcacggaacaaatgcacgcggccaacaaacctgaaaagatgattgatcatcaatatccattaataagacagaagtgaccaagttaccacaagatcgtggttcatctaccagatgatcatctgggatgggccgggcgtggtggctcacgcctgtaaatcccagcactttgggaggctgaggtgggcagatcacgatgtcaggagatcaagaccatcctggccaacatggtgaaacaccgtctctactaaaatacaaaaaattcgccaggcgtggtggtgcacgcctgtaatcccagctactcgggaggctgaggcaggggaatcgcttgaccccaggaggcggaggttgcagtgagctgagatcatgccactgcactccagcctgggcaacagagtgagactccatctcaaaaaaaaaaaaaaaaaaagattatctgggatattgatgattgcagctaattttttttgagagcttccatgtactaactactgagttccacacccctatcccactgtttagccctcaccctaacagataaagcacctgccactgttagctccttactgtagatcaagaaactgacacacagagaggctgagtcattcatctgtagccatgccgctaggaaggttagggctgggatatgacggcatgtggcctggctccagattcctgacatcctaaagcaagctgttctcaaactgttgtcttgaggcctctttaacactcttaaaaattattcaaggccaggcgtggtggttcacgcctgtaatcccagcacttcaggaggcca[134 bp omitted]gaggcaggagaatcacttgaacctgggaggaggcagttgtagtgagctgagatctcaccactgcactccagcctgggtgactgagcaagactcttatctcaaaaaaaaaaaaaaaaattcaagactcactccatagagcttgttcatgtgggttacataatattatagttacacctattagaaatttaaaatgagaaattaaaaaaataaatccaatatgctcacccaaataatattaattttttttttttttttgaatagacacaaggtcttttctatattgcccaggctggtcttgaactactgggctcaagcgatcctcccacctcccaaagtgctctgattacaggcgtgaaccacagtgcctggctctaaataacatattttgatgaaacataacccaagttttgagaaagtggtgagactagaggcattattttacacttttgcaaatcctctaatatctggcttaacagaggctggattctcctgcgtgcttctacgacacactcttctcgttgcaggacctgaggaagatccacctcacgccaatgtggagttggaaagagagggaccttgaagatgtccttgaaagaatcttaaggaacctcaggggtcctcagaccacactttgagaactgctgcccaagtgtggcttcctggccatgtgaagtggcagagtcggaaatggaagtcagaggggcagctgccaggctcacaccccaccccgtcacccctcagctgcccctggacaggaagctggaactcacctctccattgaggtagatgaggtcgaaggcgtacaaacacacctgcacctggatctcagacgcatccacctcctgggttggggcacaacggagttcgtgagtgcaggaaggtgagacggggcactgtgcctgaggccgacagcattcatctaccggtctccctctcgccccacctaactggctgcccatctgtgagggcggccatgctgctggctccaggtgctggatcgttaacggctctcagctaattccgacaacctcattccccttcaccagatatttgctctcctagacttttctgcagctaatggcagtgacatggcacagttctggccaatgagatggaaaaggggaaacctgtggggtgcaggttgtggggttttccagaacagatcttctttcatagtaaaacaacagagatgcccgaaaagggcccttcccctcttcctacttgggatgctgggatgagaatgcgatggctggagctgtggcagccattctgcagaaggctgagagaagtgcatccagactgacactctgcccttctgggcactgggcaggacccacagccaggactgggtggaagatgaggaagtacggggccttggcaggcagtggagcgggtgatgctaccttgcgtttgcgggtggtgagcacttggaatggctggatctgcttcttttcccggtcccaagccacggcttcggtgtccaggatgaaggatgtgaccgatgggagtttaatctgaaaagtgaagggagagacccagggcctgagagaggtggaagatgaggtggaaagacaaacacggggagataaattcccttttccttctgcagctctcaagatgcactaacaaagaggcaggtgcacacagatgcttttcttttattccccaccaagaggagacagaaactaatgtctctgagaatgtaatatttggtctcacaagctggaaacctaggagctcttgtcatctccctcctcctgtcacccacattcagttcctcagtgaacctgatgatttcctaagccgtccacttcccaccaactccctgctcagcctcgcctactgggcttccctgtcctgcaccgatcccctccaatccagcttccccatagcagccagggtgacactggcaagccccaaatccgatcacagcacctccctgctaaaaaccatccccatgattccccaaagctggggggactctcccgggtcagcctgggtcgtccctcgcctcacctggccccctgagcctctcttcaccccagcacgtgagcctctctgtttctcaaataagtgggcaatgcctcttccactactgggcctttgcatgtgccgttccctctagaacccctgcccctgtctgtctcctccactggcaagccttcttttccctcaagggaacactgttgcccaagccgggggcagcattcatgttgtatcctggagccaggtagcttccctgacaccaagtctaagccacacctatttctttttgagtcagagtctagctctgtcgcccaggctgcagtgcagtggtgcgatcttggctcactgcaacctctgcctcccaggctcaagcaattctcctgcctcagcctcccgagtagctgggattacaggcacatgccaccatgcctggataaattttgtattttagtagaaacggtttcaccatgttggccaggctggtctcgaactcctgaccgcaagtgatctgcctgctttggcctcccaaagtgctgggattataggcgtgagccaccacgcctggcctcttttcttttttgagacagtctcccactgttgtccagcctggcgtgcagtggtgcaatctccgctcagtgcagcctctgcctcccacgttcaagtgattctcctgcctcagcctcccaagtagctgggactacaagagcacgccaccacatccagctaatttctgtatttttagtagtcagggtttcaccatgttggccaggctggtctcgaactcctaacctcaagtgattcacccgccttgccctcccaaagtgctgggattacaggagccactgtcaccggccaggcctgtttgttacataggctcacagaatgctggtcctttcctgtggagcccggatctccacatataatttacagagccagctgcaggactctctggtgaaggtctgcctgctctgctgggctgtgagctcagtgagggcagagaccatggcaggcctgttacactcccagcctccagcatggggcctagctcggagcagatgcccagtaaatacttgctgaacgaatgagcaaaagcagccagatgcaagagactagtgccatattataccaccaacaggaagctctagaacaggtaaaaccaacctgtggcgaccaaaaagcagacctggggttgcctctggtggatgcatggtgttggacagaggagggggccttgcttggccagggacacaaggaaatatttgattttttatttttatttttttgagatggagtcttactgtcacccaggctagagtacagtggcccgatctcagctcactgcaacctccgcctcctgggtacaaacgattctcgtgcctcagcctcccaagtagctgggactacaggtgcgtgccaccacacccagctaatttttgtatttttagtagagatgggatttcaccatgtcagccaggctggtcttgaactcctgacctcaggtgatccacccgcctcagcctcccaaagtgctgggattacaggcgtgggccactgcgcccagcggaaatatgttagaatgatgagaatgtggaaatattttatacattcattggggtgtcggttacttgggtgtatgaacttttcaaaactcatcaaacagcatagtgcacactgaaaatcactaacttttagggaaattacatcttaagaaaattgatttaaagaacagtgcttggcacggaacaggagctcccctaacacgtgcactgaactgtgcctctctctgtcactgtctctaacaggcagaatgatgggcaccgtgccccctgctttcttaaataacttatttcctatttaattaggggcaggcaaagagaaaggctctttgataggggactcctcgaacaggcacgagacccctactgggtgcagagaagtccccaactctggggcctgtgaggcccagccctgtatgactctgagctgctatttctgaggcttggggcctatccacaggctggccccctccaaactcgtcctgactcctcctccccgcgttcctggctggagaggctgcagagttagactctggctttccgaggctttgttgcactagggtggccatggaacccagtgctggacagtgactcccagctgcagtccacggcgggggaggggttgtgggtgggaggtgtccaggaaagtgttaactcaagctagaatcccttttccctctttctgtctggaagaatgacatctgtttgggaaactctaaggggacaagcattggcactaaaagccaaccagccaaggacagcaggggatagaggtagcgataagcttggttcagggggacatcagtgctcagccaagtcggtgctggggtgcccacctctagatgtgagaaaaaatcatatgggcttacaccacgcaggactgagtgctctgtcatttgcagccaaacgcaacctgatctcctcccaataaaccccgcactgtgccacactggcctagatgggcctcaggcctttgcacccctgaccacagaccctggcagagtgcaagtgtgtggcagacgcccaccttggggatgcggctgatgatgtccgggtacttcccagtgttgtcttcctgattcctgctgaagatcttcacctccccgccttccagggcgtggatctgtcacgatgggagaagggaggggaaatcagctgagtcccctcatgtggcctcagctttctcttctgaccccacctgcactggtagaaggttctggaagctctggaggaggaactggtgcagagacttgagcgaatcatctcctcagttccaacagcacctcccagccctgctctggaaggccctaccatcattttcttcttcatttccaatccctacacctctccccatgtaggcacatgcaccttgctgcatgtgggtgctgatttgtttaaatgtcattatgctctagatctcattctgatttttttttgaggcggagtctcgcccaggctggagagcagtggtgcaatctctgctcaatgcaacctccacctcccgggttcaagagagccttccgcctcagcctcccaaggagctgggattacaggcgcccaccaccacacctggctaatttttgtatttttagt[136 bp omitted]ttgagcagggcggcatatatagcatcttatatgtttgttattatttccaggaacagttgtcaagaaatcattgtcactatcgtaaatcatcttgtgtcttttttctcaacactattttggagatccatctctgatcctgtgtctgttggatccaccctttttttttttttttttttaaaagatggagtctcactcttatcgtggaggctgtagtgtagtggcacgatcttggctcactgcaccctctgcctcctgggttcaagcaattctcctgcctcagcctcccgagtagctgggactacaggcacacgccaccacactggctcatttttgtggttttagtagagatggggtttcaccatgttggccaggctggtctcctcaggggtccacttcctgtaactgccccgagccctgtggctcccacccactttgcctgcttacctatccccaggtgagaaggccccacacttgccaggacagaagagacacaacacattcttacagaccccaggaccaaggacgcctgaggccctggatcacaggacacacatgcacgtcacggcatgaaggggtcatgtaggcacctcccagaacggctgttaaaatgaacacacccaccagcagcatcagcggagcccacgtttcatgagctcccactatcatcggtcaggactctggaggattgtagcttcggataagctggtgaggtagttaagaccacaccctagaggccaggcacgatggttcatgcctgtaatcccagcactttgggaggctgaggtgggtggatcatgaggtcaagagatcgagaccatcttggccaacatggtgaaacctcgtctctactaaaaatacaaaaaattagccgggcacggtagcgggcgcctgtagtcccagctacttgggaggctgaggcaggagaatcacttgaagccaggaggtggagg[138 bp omitted]cgagggctcggcagtctgtggcgcaggccggcttgaagctcaggcctcagtgaccccacacccctgctctttgacgttttcctgtctgtggaagggacatgtcccactccccatacctgtgccctctgcccgtcatatttgtattcgcaggtgaaagctgcctcctcaaagcgtttcaggacctcgctgatgccccgggtgggatgggccaacattggtttcaggggaatccctgggaaaggaggagagtgagttagaggagagggaaggcaatggattagagggggaacatggagaggagaactgctaatgggccccaggaccattctgctttcttgctattcagtcacgaagcctcccacgttttagaaggggacctagcctcccactggggactacagcccccggccttccttccaggtgggaaaggccatgtgattggaacccacgcagcatgtgcaatgtctggctcacatccttgcaaggaatctggttgcctcccctccctcctctgcgtccctcctcccacaattagaacagggaagtgagccacatttgatcacagacattggggtgacaacctttggagggcagagggacacaggaacctgggtccccgggtcatccctgggacacagctgcacacctgtaccttccctggccacctcccttgctctggacacttctgtgtgacagaaagaaattctatctggcctgacccactgccttctggcccatttttatttacttatttattgtctcactctgtcgcccagctggagtgcagtagcgcgatgacggctcactgcagccttgaactcctgggctcaagcgatcctcccacctcagcctcccgagtagctgggatcacaggcacacgccaccacgcccggctcctgtttatcacagcagtgtcacctacaccctatctactccacaaggggaaattccaaggagaaaagcagtgggtttcagcaccagggaggagcatttggttttggtgggggagaggactctgcaagttctgagaggggcgcctacgatggccaccctcacgccgactcaggagggagcagggctgctgccaggctggtgagcgcccctggggcctgtacctgggctcagcttgcagtgctccgggagacgttccaggccgtgctccagcagcacggggataattcggtccaggtcgggaacctcgctggggtggcgggtgagaacaagataggggaagcctttctagaactcacacagtttggaaagagagctcggcctgctcccagaagcctgggctcctggatgcctctgcccactgagtcaccacctgccaagctcctcttgccaccctgtctctgtgctctcccttcgtgtcactatctgttgctttgtctcccttagtctggccttgcccctgttccctatctgtcaccacgagaccagcgattctctactcggctacacaggagaccactcaagaatacagtttttaaaaaaaggtttttggccgggcatggtggctcatgcctacaggcatgtaatcccagcactttgggaggccgaggtgggtgcatcacttgagcccaggagttcaagaccagcctagccaacatggtgaaatcccatctttactaaaaatataaaagttagctgggggtggtggcacgcgcctgtagtcccagctactcaggagactgaggcaggagaatcacttgaaccctggaggcggaagttgcagtgagctgagattgtgctgctgcactccagcctggatgacagggcgagactccgtctcaaacaaaataaaaatagacaaaggttttcaaggctaggttccacctacaaagattttgatgtagctggtgtggggtaggcctgaggtcagcagctgatagagccccacgtgcaggcagagttgagcttgctgcccgggcctgttcaccactctctgctcagcacccagtggggggccctggcccagagcaggtgctctgaggccatctgtggaactgccatcggccctcctgcctctgacatcctctctggggcagtcatgatcttggagtcaccagccctgggtcagctgctggcctaggtccctccacatggctctctctggagccctcgtggccgctccacggatgtcctctccatgactgtcaagacccttcaccatgtgtcagtcacctgctcctctctgggtcccttaaggcctttctgcatgcacagccctgtctggcactcagaaacctcatgttgccggctgccctcccttgctgtcagcgtctttcttttttttaagacagtctcactctgttgcccaggctggaacgcagtggcgtgatctcagctcactgcagcctccaactcctgggttcaaatgattcttgtgcctcagtttcccaagtagctgggattacaggctaatttttgtatttttagtagagacagggtttcaccatgttggccaggctggtctcaaactcctgacctcaagtgatctgcctgcttcaggctcccaagtgctgggattacaggcgtgagccactgtgcctggccgctgccagcgtctttctatacctctcctggggtcactgacccttcactgtttgccaccttcctgatctttgtcaccatccttgtgtcaagcaccagccttgtctagatcaccacctctgctctcagtcaccccgtgaccggcactcgtgatgcctgtccgtcacttcactggccccacccactgctcctctggctccacccccaccctggcactctgcccacagcccctggcaactccacccactgcccagctctcaccagaacgtctgcttcaggatcatgccttgctcctccagccacgtctttctggcctctgctgtcttgcccttcccagcatccaccatggctggtgggaattctaagaaaagacccaccagaggctttggaaggcacccacatccttggctacaccagggtgcagtgggtggtttgctgtatggcaaggaatgcagatgccgcggcccaagacgccccctcccccccacccaggagagaggagcctggtatggcaggggcccgctggggaaggggcgggcatgggcctctgaagaggaggggggaagcctgaggtaactccagcgagggatgcagagacgggccacaggagctcaccttggcccgggggcgtgaggctcactgcctgggagagggcagccagcaccgactgctctgccagcccaaggcgcagccgtccgctcagggacctggggagagagcaggccagggaagggggcttgtctgcacctccccaatcttgcctcctcccttctctgatctcctcgaccttgatgtatgtagaccctctcctcaaaaaccagaagaatcttcagagcctggaagggaccccagatatcacacagccccatgtgacagatgaggaaactgagccaggcagtaatgatcctgcccactagcatagactggggaggggcacaagtaggtgcaccagcacctcccatctcagctgccctgaggggttggcgaggcttgaggaggatgagtcagggagagaactgagcctggcgcccgccctggtgactgtaatggtcaggaccccagcatggtccttgctttgagccagtggcaggagacaagtggcttagtttgcctccccatgtctccatttccccttctataaactggaggtgagggtaacaagaccagtctcacagagttgctggtaggaactgatgaggtaaggcacggggcacagggcagggctcccaagaaatgctccatgatgtgagccctcaatggatttgctctcactgtcatggcaaacaaaccctggcttcctgctgcagggcccgcgcccaagccgaggcagacctcaccaatcaatcacagcatgcttcacccacaggggcccaggggccttctctagacagcactaccaagggacagaagctggcctgtgaaaggaaatggtgtcccttcccactctttaggggctgggcctcctgctcatgcttttctcatccaaggatggtcagggcatttgtgatgattccagctgccagtccctccctcctttcacctccgagcctgcagtccccctctgtagcctcacaggcccacacgcttacctagcgatgaaccgggcttctgagtggcggcaggccacaaagaggcctttgatgatgtctatcttcttggctgtggactggagagtcaggggaagagccgtcagtgcctggtgaaggcagggaccacacctccaccccaccagccgtgctgctgccctgcattttggaatacctgccctccttccctcaccccatccccatgtcccagctcccatggccgcccactcttagggcagtaagaacgagctagctctcctccttgcctccctctccctttatccaggaagtatttactgagtcctgtcatgtggcagccatggcattaggtctgctagactctgaagaggagactcccctaggattgggtgcaggaaggaggagaggaagctgtgcaccccatgagaaggactgatgcgacccagctgatggtctacccagaagccttcctgacacacgcgtggcctcaggtccccaagatgtctggggtccgggatgagcggcccgccccactcacagcactgccagtgagcctggcgatgtcgcggaacttgctgaagaccccggaggcagtgagcggaggtggtggcagcatgagcctctgggtgctgcggctgttctcggccaccagccccacgtcgcctttctcggctgcctcagcccggacggactccagctgccgaccttcaggggagagcgcgggtgggggtgtcgagggtgacagttgtggctgcgtgtctcccttctctcgcggcctggatgaattttctccagctgtgtgtgcttgtggcgagtccctgcacctccctgtgtctaacgctcacccacttggtagaaatggcttggggaacgtgcccccagccacgctggctgtaggaagtcagcaaacatgcacgtggagccaggaaagcggtggatgaacgagcatgaccacactcaggggagacatctgggccggtgtcatcagggcgcggatgggatttaaagccacaggcgggacaaggtcactagggaagtgagtgtggacagagcagagaaggccaagggaccctttcctctggcgggtcatgaacatctctggcagtgaccaaagacccttcggcttgttttggagccaccagcttacacacgtgggatgtgctctggccccacttactgtccagagctgggtcccatgggcgcctgggtgtaagagctggggagatggagcctcaagtcacggtgacagctgtgacaagcagctctcaacctatcagaaccaacacacccttgtcaccagatactgtgtgtcacctcttttctggtctgaaataaaatgtggagataacataacctgcctacacctatcgagataacgccctaaccctaacacagaaaagaatgaaagggaaagcaatccgtaatgaacgaacaagtgcgcgtttcagtccacagatgctcagccgcggcacagagcacatgaaggtgggcctcgcgcctgaagcgaaactgccacaaatgggagagccgacagtgtgagcctcaccaatgggatgttatcgaatcacacatcaaaggggacgggattctccaaagtggccaacaactcacaacaaacccgggacttggacagccacgggggccacaaggcggcacggagagcagtgtgagtgtgaacacgacccatcaagggtggaggcatgagacagtggaagaggccccagctgccatggattgttgggcaggaaagccagcatctgcaacttcttttgtgagaaaaacagatccttctttgtccaagccaatgtagttgggttttctgttacctgcagctcagagtattcttaaccgaccccgtgtgtgctgggtctggtatgacgtcagtgctcccgaaacacatcttgagtgaatgagtgagaaaatcttgagtctcatctcctctggctcccataagcccgtaactctttcctgatccaagtcaacctttctcagtccctctgtcctctcatgaaagcctgaaacccctgccttccctaaatgttggtgcccatggccctaagccagctccagtgctcccagcacatcctctccccaggcggatgagaacccaccagtgggtggtcatccctcctacactgaccagcccgaaccctgggctctgagccagacctggtgagcctcagacccgtttccaaacttcctggatggccctgggggcccacagatagaggttgctcatgcctgccccacgctggggtgattaatgccccctgcaggtgcctgcccctcaccagggtcccaagctgccgacggctttgtcatccatccagtcacccagggagatcctggaggcattcctcctgcctcctcaccctgacatccactgtctgccagatctctcctgccctcttctctcttctctacagctggggtccagctcctcttccccctggatgctgccccttgcctgctcacaatccttccatggctccccagtgtcctcatgataagcaccgagcactccaggcccttggcaggcgggccatccgcatcaccagcctttccacccagcactggcggctgggccccttcaggctgctggccccccacacaccatgttctttcctcccactccttccaatccctccagtcaaagtcctttcagacctctctaagccccaaccttccatctcagcccccaaatcctgctgtctctgcctccagcatctttccccagccctccccttccctgcaccccacaccccctgtcccagcacatgcctggtcctccctcacctgaactgctgcccctgtgttctctcccacacccctgcaaatctgtccccatcaggctctcctccctctcagccttctcctcaaccctgtttcacagcctctctccaccatctctccgatccacctgacctctgcattttctctggctgagctcctgtccttctggtccctccaaccacagtcccccttacctgtggcctgggccactgccttgagaaggacaccatcacccacgccaagctccaggccctgctggggtggcccaaggtggttgaggctgaggtagaggacagggaggaggtctggaggcgacagggccaccacggagcgcagcaagttgctcagcgtctccaccatccggagcctggaggaggggacgggggtatgaacacgtggttcctcaaggtcaaagtgtggtgtcggggtggggtgggtttaagggggtggacactagaaagaaatggagaaagaagaggaaagggctcagaacagtcccaggctctggggcctggagccatgaggacaatcacagattgctggaggtgaaaccgcctttgcaaaaccgtaactgaggaaattatgacagtggaaagaaatcacacctaaccgattccatcttgcttctaacctttaagctgtccttgttcagtcctgggcataggcagaactaactttgggaaggaatttggttcgtggcttgactctgaaacgaaattggtaatagccctttctggaaaagacccctttttgcctaaggacctgccttcgcaagactcacaaattagctacaagattagaaatttaggtttaggggtcacgcagcctctggcttccccgattgctcctggggataacatcactactgtaaaacctaagatgagtgcttaagatagtttgcagaccctgcactcagtctgacgccacccagactgtaatctggctcaacaagttctgccatcccacccaggaacagaagacagcaagaaaacctcccttcgaccccctgtgagtccatcttcaacctgaccaatcagcactccccacttaccaagcccctacacgccaaattatctttaaaaactctgctccccacatgctcagggagactgatttgagtaaaaatgaaactccggtctcccgcacagccagctctgcgggaatgactctttctccactgcagttcccccgtctagataaatcggctctgtctaggcagcgggcaaggtgaacccaccggacggttacagtgggggagtaacttggtgtgacggtaacaatgatgaagatggtgatgatcagcccagagaaacgacagctgatgctacggagcattttctaaattcaggagctggctttgagcactttgcaccttttttttgagacggagtctcgctccatcgcccaaggtagagtgcagtggcacgatctcggctcgctgcaacctccaccttgtgggttcaggtgattctcctccggagtagccgggactaccggtgcgcaccaccatgcccggctaattttttttaatttttagtagagacggggt[144 bp omitted]ctctgaggtaggtaccattattatttccattttacggataaagaaacagaggcaccgaaagagtccgtggcttgcccaaggtcacagagcgagtaagtatgaagctgagatgtacaccaaggccgtgtgcctgaggactgtgctcccagccaccaagctgcaccacctctaaaacgaaaaccgtgtttctgtctaaaacttcaaagctggaaagaatggctttgttactgaaaaacttagggggcctcattagaaacagaagctgggtttttcctacagaagtctcattaccgaggtttttaaggtgcagagaagaaatacaaaaaccaacatcagggaaatccctcagtaatcattgtaggcaaaagccaccattggatggtgcagtggatggaacagcccccccaaaattcaggtccactcagagcctcacaacatgacctcatttggaaagaaggtctttgcggatgtacctgtagattaagatgagagcatagtgaatgaaggtaggctctgaatccaaaaagcatccttacaaaatacagaagagggccgggtgtggtggctcaggcctgtaatcccagcattttgggaggccgaggcgggccgatcacttgaggtcaggagttcaagaccagcctggccaacatagtgaaaccccatctctattacaaatacaaaattagggccgggcgcggtggctcacacctgtaatcccagcactttgggaggcggaggtgggcggatcacgaggtcaggagatcaagatcttcctggctaacacagtgaaaccccatctctactaaaaacacacacacaaaaaattagttgggcatggtggcaggtgcctgtagtcccagctactcgggaggctgaggcaggagaatggtgtgaacctgggaggcggagctgcaagtgagccgagattgcgccactgcactccagcctgggcaacagagcaagactccatctcaaaaaaaaaaaaaaacagagtgctgggaacagcctgaaatgctccactcatgttggggaactgagaaatggcatgtgccatgtgagaacgaagggacactacagagcagtcacaacaggctcgaaccactcaaccaacatggacacatgtggaaacgggtttgatagtgaaggcaagcagaatgagccgtacccatgataattttgtttgtttgtttttgagacagagtctcactctgtcacccaggctggagtgtaatagcgtgatctcggctcactgcaatctctgcctcctgggttcaagtgattctcgtacctcagcctcctgagtagccgggattacaggcacccgccaccatgctgggctaattttgtgtttttagtagagatggggtttcaccatgttggccaggctggtcttgaactcctgacctcaggtgatccacccaccttggcctcccgatgtgctggaattaaggcatgagccactgcacccagcctccatgataatatttatataaactaaatacacaggggcgagtgctgggggtgaggaggacaaggagagaagaggaaatggggacagagaagggggctggcagggaccagcgatgctaacatgctgctgagaaggaccagggtggggcagtgctatgcactgggcatcactggggtgggacgctctgcagggaacctctgtgaatgagtagggggtcctcgctataactgagacctcaccttcttttgtgaatatggagacatgtaagcaagactgaagtcacttttgatgactcagggtggactagaagtaatcacggactgtgtgcaatggtgccagtcatcccgagatggagcctgtctccttaccctgcacatctgggctcgccccttgtgtcttgctctgaccatgagaatgaggcagaaagtcaagaggacctgcagccgcttttgtgaccatgtctgacatccatgatcatacgcccgagcggggtcagaggccaagttgacagggtttggcggaacaaggcagcacagaccgccatgcagaggacagacccagaagcgaccccgccccccacccaggcagtcctcattagttaccgagcagacacctcctcgatcttctcaaacgtccgggccacagccaggtaaggaaccctagggaaggaaaagagacgcaagagtgacagtggtgcaggctataccatgctgcccgtctgcacccttgcttcctcacgcctcctcgggacacccttgccaatacccaaatgcatgagctcacttcccagggctgtctctctgtccctttcaatgctgctgattgtcgccaaaacacaggagggagagacttgaccatttctcccaaccaagactctgcttagagagcctccggtggcaacagggaccggagggggacagtctgaaaagggagaaacctcacttctggcccggtttccagcaggcatcttccacgggatgatagttgttcttggcaggattgtaaccagatggatccaggggtctacggaggcaaaacggagattgaattgcatagagccctgggtcaaagcaaagtcattccttccaactgtgatgtgccaggctctgttcaaggcacacggtgcagagctggatgaaaacaaagtttgctaacctggagctcacattccagcaggagagtcagaggaaagtgggcaaaaagcccccacataaacacatcattaattttaggtgttaaaaaaatctttcagaaaacaaaagaaagccgagtagaggaagaggatgagatgagggtgctgcttcacagggtggtcagggaaggccggagacatctgggcagaatgagggaggggttagcacagtgggcagcaggggacgagcattccaggcagagagaatagcgtgtgcaaaggcgctgaggtgcagacaaacttgagaaacagaaaagggattgcgtagctgagctgggacagagggaggtgcgtatagtcccgggtgtcgcaaagtgccaggtgccatgctaacaccacatcgattaacaatcagacatgggaggaagggacctttccttttttcttgagacagagtctcactctgttgcccaggctggagtgcagtggcatgatctcggctcgctgcaacctctgcctcctggcttcaagtgattcttctgcctcagcctcccaagtaactgggattacaggcgtacacgaccacacctggctgatttttttgtattttcagaagagacgaggtttcaccatgttcgctaggctgattttgaactcctgacctcaaatgatctgcctgccttggcctcccaaagtgctaggattataggcgtgagccaccgtgcctggccagaagggacctttctaacttccttttccggataaggaaactggggcacagagtgattaactcacccatggccacacagctggtaagcagcgcagctctagagacagttcccaacctctatttttttttgagacagggtctcactgtcgcccaggctagagtgcagtggagcaatgcgcactgcagcctcaacctccagggctcaagggattctcctacctcagcttcttgagtagctaggactacaggtgcaagcaaccatgcccgactgatctttgtagagatggggttttgccgtgttgcacacgctggtgtctcactcctggacttaagcgatcctcccacctcgacctcccaaagtcctgggattataggcatgagccactgcgcccggcctcaacctttatatcgtaagtagctcacactgaccccagccaaactctgcattcagactcatctgggttccaatctgctctgccccggccagctgtacctgctgaggaagcagcttcccctctctgaaccacagcatctccatctgtctggggagctaaggggtccctactatgacaggttgtcctgaaggttacataaaaaatgacagtgagggttcccactcctgggtgcacttcatggaacaatgaggactccccagccccaggcctacatctgtaccaaaatggggacaagggttgggggggagaaagagacctcaggatatttttcagctcttcagctgattctgatgctcacacagggcatggatggccaagacagatagtgccactgcagggctgtgcatggcctttggtatgaacttggggtttaacaagcggtggccggcattacaatgaggcagcagagtgtggtgggcaggggagtctagagccagtcagcctggctagaaccacaatgctgccactccccacctgtgtggcctgagcatggcattaaaaacaaataagaatagtagcagcagttaccgtgacaacatgctggtcataatcaaggccagaccctgggctaagtgtttcacatcctcagaagagagacacagaaaggctaagtcacttcctcaaggtcacacagctgagagaggtggagctgggattcctagccagtcctcaatactgtcccacctccccgctttacttttctcacccaggaaaccaggataacaacagaatctactcccagcagtgttgtgaggatttggagcattgcgtcagggaaagcccgttgctgagtgcctggcacgtggggaagagtgggtggaagaacatgcttcctctcatcactgtgcccccatctgagaggtgaggaaattggagagtgggaaagtttgcctgtctcttggaggcagccattggagacagagg[143 bp omitted]aaattaaaggggtttggaataatccctgctgttcagcagaaaggacaggtgggttaaaaagtatgacgcagtgagtccaaaatctctttgatgtcatgcctctacaaatgaaacagataacgacaagaaattctttcagctttaacatttcatgattaaagtttaagtctaacaaaaaagtgtctgtctctattaaaaatacaaaagtagccgggcatggtggcgcatgcctgtaatcccagctacctgggaggctgaggcaggagaatcacttgaacccgggaggtggaggtcgcggtgagctgaaatcgtgccactgcactccagcctgggcagcaagagcaaaactccgtctcaaaagaaagaaaagcagtcgtagtatcacttgaaatagaaaacagaactttatatacagtaggacactgattttatttggaaaacatatttataaatacacaaacacggacacacactcaggaggcacgatatggcaatggggaagaaataactgctaggaatcaaaaacattccttagggtcccaggcctggccctacccccacctccctgtgtgacctggcgaggcccgacctaacctctctgggctaatcatgtcaatgtgtgtaaaatggctaaagtgctcccttcctccacaggaatactgcagagaggacgttaacgtgctatttaacctccttgataaggtctcaattgggggtacaaaattgatgtcaagaatcctccgaacacttttttgttagacttaaactgtaatcatgaaatgttaaagctgaaagaatttcttgtcgttatctgtttcatttgtagaggcgtgacatcaaagagattttggactcactgcgtcatactttttaacccacctgtcctttctgctgaacagcagggattattccaaaccccttttccgttaatttttttttagctttcaggacatcaagaattcaagaggggatgaagtccacgctgctaacaccatcacattgtatttgaaaacacaatctttagaggaaaaaaataacttcagatggatatatgattatgtaagaaatcaggctggccgtggtggctcatgcatgtaattccagcattctgggaggctgaggtgggaggatcacttgagtccaggagctcgacctgggcaatgtagtaggaccccatctctacaaaaagtaaacaaaaattagcccggcatggtggtacatgcctgtagttccagctacttgagaggctgaggtgggaggatcccgagcccaggagcaccactgcactccagcctgggtaacagagcaagaccctgtctttaaaaaaaaaaacaagaaacaaaaaacaaaaaacccaaaaaacctaagttctataaagaggaatttttgtctgatttgtttcctaccagatctcaggcacctaaaatccagtagctaacacgtaatcagtcctttgtaaatacttactgagtaaataaatgagtccatgattgactagtgaaaaaaaaaaatctgaaagtgctcatttaaatttctttcatggcagatttcctgggcttcctaggggccagccccagtgctgggagctaggcaagaagactaagaaggctgggacctcccacagccctggctctgtgggaaggagcttatgtctggttagggaggctctttaccatgtgacaagacataaaagacagtctgactcaagtgctggggacacgcacctcctctcacacatgaagggagaggcacccggcttccctaagcaggtgcaataggagttggggcctgagggaagcctgctgggcagggtgggttagggacagt[131 bp omitted]ggccaacatggtgaaacccggtctctactaaaaatacaaaaattagccaggcttggtggcgaggcacctgtaattctggctacttgggatgtggaggcagaagaatcgcttgaacctgggaagttgaaggtgcaatgagctgagatcgtgccactgcactccagcctgggcaacagagtgagattccatctcaaaaaaaaaaaaaaaaagcagggaggaatgacagcacgtggggacatggtgtgcagagggagcaggaaaaggctgcagatgccaggaggctgcaatgtaaggtggacagggctggctcatgagggcactgggaagcccagcatatcctctatgctggggagaatcgcagatgggttttgagcatggcagagatgggggggtgacctcattactttataggatatttatccacccacgcatccaatcatccattcagccagtcttcagtgcggcctcctgtgtgcatgttagatgtcgtgggaatcagcccagacatctcttcaaataattaacaaaattacagtgaagcaattaattgcttaacaacctattcagtgtcccacagccccagcacactaagcacatcacgagggctggggcagggcggccggctctctatggttcatcctcgtgggccgcccagggctggcaaagaaggggtgttcagtgaattttaaggcagagtagacgcgcct[140 bp omitted]tgaaactgtgtctctactgaaaatacaaaaattatctgggtgtggtggcatgcacctgtaatcccagctacctgggagaatcgcttgaacctgggaggtggaggctgtggtgagctgagacagcaccactgcactgcaggctaggcgacagagcaagactctgtctcaaaaataaaaaatctggtgagttcagagccagaggaacagagaggtaggaagtgaggccagagagggaggtggcagccagtggccaaatgggcttagattttctcctgacggctctggggaaccctagaggggcagagtcaactctgggtgttagaaagatcccccaggctctacggggatcagactgaggatgaaagactggaggcagggtcagagggtggctggggccacggtcagcaaactccgaccctggaccgtttctacaggttctgggatctaagaatggttttgcaacaggggccaaatgtgtcccataaagcctaaaatatttactctctggctctttatagaaaaggtttgccaagtcctgcaagaggaggaagcctgagctgggggtggggctgtcggaatgcagagaagggaacacatcccgaagaacctttccagacctggacactgactcacccctcagcagctccctcctttcctggagcccctggctcctcttccttcacttcttttttgactgctggcttccggggggctaggaatgaagacagaaaacagtgggtcttttctccttccggtagcccccacctcccatccattctgcacccagcaccaccccagtgctcagggagatgggagacaggctggtagagacaaggccgactttccaaccagcaggaaaggaagaagggtcttcgcagcatctcaggcctctggagagaggctcaccagcctcctgcctgtacaaccccgggaggtggggtgagcaagggaaactcactgaagaagctgctgagcgtcttgggagctctgcggggaggcttggtctgctcttcctcctcctgcagttcctgcttcgtggccacctcaggctctgaaacgctttccgtcggggtctctgcttctgcggtgagagagctcagacggtgatgcaaactctttgaccctgagactttttttttctttttttttacccccaagatcattctgaccctgcagatggaagatataactacacctacccttttcctttctgttagctttgagctgagatctcaggcctgctgtctactcctcagtgctaactagcggaattctagcacttggcctgaaataggagacttaggaatagtggtaaaaagaaatctcatcgtcatgagaagaaaatattcccactcctcccagcagctgcagaaaatcagatacaactctgtatccctaaaattctcccggcaagtgttgtttctaacacaggggcctcatggacacttggaccaccctgagagggtaacttcagcctctaaaatcctgtaactcagtttggttgtctaacttaattaataacatttaatttacacctatgacttctgaaagctatgaatactttttatcttttactttgtctgaggcgggggagttcttgctctgtggccaaggctggagtgcagtggtgcgaccataggtcactgcaacctccacctcctgggctcaagcgatcctcccacctcagcctcccaagtagctggaactacaggtacgtgccaccacacccaggtcatttttgtattttttttggtagaaatggggtttcgccatgttgcccaggctggtcttgaactcctgggctcaagtagtccacccacctcagcctcccaaagagctaggattacaggtgtgaggcaccgtacccggcctaggaagattttttaaagaatggctggctctttcctcctttcccacatgcatggggaaaaataataattaaaaaaaaaaacccgagtaataaaaactattattcttctagattcggcatttaagcaataagtttgagaatctatgccttgtttaaattaatcatcctccaaagacttctgaccccaaaatcaggaggtggggcagggcggaggagaggaccagaaactcactggaggtctttaggggcttgggaggcgtggtgggctggtccccgtcttctccttccttctctgtggccacttcagcctctgtgaggctttctttcggggtctcctcttctgacgatagacagaacggtcagatggcaaaaaaatcccattgaacctacaagggcattttgactctggagacagtctgccctcatctgtcatctgttcttttttttgagacagagtttcgttcttaccgcccaggctggagtgcaatggtgtgatcttggctcactgcaacctctgcctcctgggttcatgcgattctcctgcctcagcctcccgagtagctgggatgacaggcgcccaccaccacatccagctatttttttgtatttttagtagagatgggatttcaccatgttggccaggctggtcttgaactactgacctcaggtgagccacccgccttggcctcccaaagtgcaggtcttacagttctatcttgtgccaatccaatgtgcctgtaaagcagtgggccacgtaagaccctgctccttgtcaaccccaagcaaggcagcgaccttgagggggtccagcccgtttgcctatgtagccgagacataaatggtgtgtctttccttaccaatgattcctttagtgttattcaccccaaaatagaatctgaaagggttaaaaatgcaaatgacagcctgttatagacaaaaataaaaatcttcaaagttaaaaaaaaaatcttacctctagggtcacaatacaaactacaaaaaccaacttgggaaaaatctgccttagtagaaagaggccacccccgccacccctcactggacactgacagtggctaaaagtgtagtttacaataaaatttgtactaaaaattgtcaataagaaatcaaatcttttttttttgagacacagtctccctctgtcgcccaggctagagtgcagtggcacaatctcggctcactgcaacctccacctcccagtttcaagggattctcatgcctcagcctcctgagtagctgggactacaggcgcatgccaccatacccagctaatttttataattttggtagggatggggtttcaccatgttggccaggctggtctccaactcccgacctcaagtgatccacccgcttcggcctcccaaactgctgggagtacaggcgtgagccactgcacctggccaagaaatcagatcttaaccaaatttaaatctgccctggaaaatggaccttttatttgtttgcagaaacaaaaaaccaaatgacgttaaaggctgcaattggtgtaatctcatgcaggccccagatgatcaatcgatcagatctttatggctgttttcggtgggttcaccaacatgcagggaactcactgggcgctgcaagatattttagatttttcaaaggaaacccagcgacacctgctggccagtgtgtgaactactagttcgaggtatttcagttttcagtattaaatcacattccttgcaatgacattgcatctctgcaaagctgggttttcataggttgctgctataaaaatcaagtactgtacaaaaatcaacatagaacaggaaatgacgttggcagttttcaattgaattccactgtttaagatgttacagagtatccaaggcatttcccacaagtaattatggttatttaagaacaaaatacaggctgggcgcagtggctcacgcctgtaatcccagggctttgtgaggccgaggtgggcagatcatgtgagctcaggagttcgagaccagcttggtcaacatagtgaaaccctgtctctactaaaaatacaaaaattagctgggcgtggtggtgtgtctgtaatcccagctactcgggaagctgaggtgggagaatcgcttgagcctgggaggtggagactgcagtgagcccaaactgtgccactgcactgtagcctgagcgacacagtgagactgtctcaaaaaaaaaaaaaaaaaaaaagcacaaatattactttttttccaatgtatgtatagtatctaatagttgtttggacataactacttaatagaactgataaggtattggcctaggagcatcataaaaaaattactaagacatcaagggtgctgtgaactaagaatgtttgggaactgcaactttatggtaaaatttacaaggaaaaggaaatcatttagaggaaaaatagtttccattaaataaatataaaaatagcaaataaaaatgggaaactgtgcctgaattattactaaattaagatgtccaaacaaatatatcccacaatgttttcagaacaaaagttcccatattggtaggtggaattcctggatgcctggacacaggcatcaaatcggcagggtccaaacatcctgagctctcaggcccctgcccttgcagatccaaaacacacacacacacacacacacacacacacacacacacacacacacacacacacctctccttctgggggctcaccttcctcctcctccttcctcttggcttcacacacacacacacacacacacacacacacacacctctccttctgggggctcaccttcctcctcctccttcctcttggcttcacacacacacacacacacacacacacacttctctccttctgggggctcaccttcctcctccttcttcctcttggcttctctgtcctcgtcctcactctgctcttccaggacttcctgaatggtccgtttcgggagctgcttccgagctggggaggcaaagggcttggtgtatctgacctcgctggctcgtgtgctcccatcccggagagctcacacccactgatgtagcctctggaaggctctgggccctctccccttctctgcctgcacacagtcactgccccagtgcaggccgcacccttcaatccctcctgcttcctggctgtgtgaccttgggcaggttacttaatttctctgtgctttgctctctcacgactgcagaatagaaataatccccacgagtaaacaatgatgtaatgtacttggcacagtaccgattccagcaggtcccctgagctccccactgctcccctcagatcttaactgcctccaagtgttccagacagcttccccggaacctcagaagtctggaagtggcagggaataaactagccccaggagaggccctcaccccacgatcggcaggagttggtgtataaataccccagctgcctcgcatctcgggggtcactctggagcatttacaccgttccccagagaatcccacaaaactaagctccagctgcccaacacatagcagacccaacagcacatcctgtgttggctgctcccctgtcctgaatcaccctctgttccctgcacctcctaaacaaaccacttgcacttgaatccctgtttcagagcttcagaacctgcttctaaaagcctctaaactcagatactaacccatgatgaagagctcacacaaaggcagttgtacccatcttcactgttatatctcatgttggccattgcgccacctggtccccggtctcccggcccccagtggctccttcacgtggccccagagggaccttctatcagcatggctggcactgtctctccctgctcaaaacccttccatgactccacattctctgctttatccaggataaagtcttttgatgtctaccccgatcctacctaatctctctccatctgaccttctaacccttcccacaccacatactccaccttcttttatatcactgctaaactggggtgtttccagacacaccaagctgtgtcacccctccaggcctcagcatgtgaggtttgggacatagctcaatgttgctccctctgaacaagatcccctgacacacccccagggccaacctcagcgtccacctggagctcccagcatgccctcagccacactgtgacttccttatggccacctttcattcagggatgaacctgcctccccacctcacagcccttccatggctcccaggacccacagcacgaagcccaggctccttagctgggagtgcaagaccttttgagatccagcccccactctcctctctagctcacctctcaccacgtgctatcctcaaactctccctgcttcccaggtcgcatccgattctccagaaacaaggaagtagatgagaggccccaaacatcccatgctgttcccatctcgaggcctctgcacgtgcccttcttgtctgaaatgcatgcatctgtcctttctcaacatggccaaccccaacccatcttctaagactcggctcagccatcacctcccctgggctgcttgacttctgagctcccagagtaccctgcgtcacccagcatcgtccgatggaaagatctggcaagccacgtatgtaaccttaaactttcttgcagccacgttaataaaaagggggaaaaaaccaggttgaacttggtttgaagagtctattttgctcaatacatctaaaacagtatgattccaacattctgttttcatgctaggtcttcaaaatccaatgaactcactgcacatctcaagttggacaccagattttcatcggcaacatgatctgtgtaggtttcataaaatgtacagctattcacataccaaagctgttccaaaatgatgtggaaaaagtgcaaagtctttacgcactgaatcacatattagctttcaaatgtaaattcaactgaaaggatctaacatgaaagattcagctcccctgtcacactcaccacgctaaagcgctcaataggctagaccggacggcaagggctcacactgccccgcattacgaatgggtctctcgccctgttcttaccccacagcaaacattccaagtcccccttaggacaaagacgctgttccccaagctggttttccaggaccttctcacctcattgctcaccatccccaatcctgcgctctacacgccagcacaccaggccctcagcagcccccaggccttctcaatttctatgttccccttgcctagcatgctcccctcctcctttgcttgttgcctcttctttgtcctaaagggctcagcttggttagcctctcttctggaagtctcccttgagccatggccccgcgcttgtgttcccacatgagctgtgaggcctccatctcagcgcataactacagtcacaatgacccacaatgactgagccccgactgagggctgggcccagttctgagcagcgtacacgtgttatcttctaactcagatatttctgtgcggtaggtgctatcattatcatcatctctacagataaagcaacctaagctcagagaaggtcagtcatttgtcccaggtcatacagccagtggatggtggacccgtgctcttaaccacaacactaagaccagagctgttgtaaggat[226 bp omitted]aaggcaggagaatcgtttgaacccgggaggcggaggtcagtgagccgagatcatgccactgcactccagcctaggcaacagagcgagactatgtctcaaaaaaaaaaaaaaaaaaaaaaaagagaaaaagaaaggcaggcgactgaaggggcaggggcccgtgtgttctcacctgtgcgacgcttcggaatccctgatggggaactgtccatgggagaggtgtcagagagggaagcattgttctcaggagatgtggcaggacggggcggggagacctgtgagcagtccagggcaggcttctggaagaggaaagaacagttctagagtgagcgggggaaggagggactccattttccaaaagttgagagtagaggggactgaaacctctctgtctaccctcctttctgaccctatggtctcagccctaactcaggggtggcctcttctcacctgggccatcatcccgccctccagtgcaggatcatggtcccatcaaggacccccatagctcttctgttttctacagtaacagaatcttcgattctcctgcttc[132 bp omitted]t[135 bp omitted]gcctcccgagcaactgggataacaggcgcccgccaccacgcccagctaatttttgtattttttttatagagatggggcttcaccacgttggccaggctggtctcgaactcctgagctcaagcgatcctcccgccttggcctccagagcactgagaatacaggcgtgagcccccgtgcccagccttctctccatacagtttagatgtttgttccctccagatcgcatgttgcaatttggtctccaatgttggaggtatgacctggcgggaggcattcaggtcacgtgggcagatccctcatgaatggcttgtaccctccttgtggtaggaaccgagttcttcctctcctggttcacatgagagctggttgtttaaaattcctctcttgccatgtgacacacctgctcctccttcaccttccaccatgactggaagcatcctgaggctctcaccagaagcagatgctggcactatacttcttgtatagcctgcaggaccgtgggccaaaataaacctcttttctttataaattaactggtctgaagtattcctttatagcaatgcaaaatggactaacatgcatttcctggttcaaataacatccacttaatgttgagtggggtgccctcctcttcctgttggcagaatatggatgttcacagggacaagggcatctacagagagcaaacgacagcacagaggaagcctgggcctctgaccctgtgagacggtcacatgaatcccggactctgcactcaggagagagaaaaataagtttgcgtcttgcctaagccactgctaccgtgtctcggtttcaaccactcacttatcttcttacagggccctgtgccagttattaagtgattttctctcagctccaaacctgtcactgtccagtctccttcatgctgccaggaccgggactccacaaatcttcttcttgctctggcgccacctgggcatcaggcagtgccaatggagggaagcagagggcactgcatgactggaggcacagccggcttgccgggggcagctgctggatcccactgacagttttttctaacattcacggggcttgccacgtggtacctgatcagagaccctggcatctcccacccagtgctcccttcctgaaagatcagagttgcaggctctcggggcaccttctctaagctcagagacctgccagcagtcccaccacagaggtgtgaatttcagctcaaaagccacagggatggtcactgcaccccacagttgctacctccatgatgccttagagttagttctctttttagcccttcagttacctatttaacaactgcatacctagtgaccatcctttaaactccctctgttcaaatcactggtatggtttctgtctcccattgagaccctgatggagatacaggtctcagataatttttttttttttttgagatggagtcttgccctgttgttcaggctggagtgcaatggcacgatctcggctcaccacaacctccatctcccaggttcaagcaattctcctgcctcagcctcccaagtagctgggactacaggcccgtgccaccatgcccggctaacttttgtagcagagatgaggtttcactatgttggcctggctgctctcgaacttctgacctcgtgatccacccgccttggcctcccaaagtgttgggattacaggcgtgagccatcatgcctggccagatgaatattttaaacactgcccaggactaaatgatctctgcctctcttctgcccaaaactcttcctagctccccagaagcctcagggtaaagtctaagctccaaaagagatctctattctaatacctggaacctgggaatatgttaggttacatggcaaagggtaattgaggttgctaatcagctgaccttccgatagtgggattaccctggactatccaggtgggcctgatatagtcacaggggccttcaaagtggaagagggtggcaggagaggaaagtcagggtgagatgtggccacagaagaaaggcacagaaggaggcaatgccacttgcttatttatttatttatttatttattttttgagacagagtcttgctctgtcacccaggctggagtgcagtggcacgatcttggctcactgcaagctccgcctcccgggttcacgccattctcctgcctcatcctcccgagtagctgggactacaggcgcccgccaccacgcccagctaattttttgtatttttgatagagacatggtt[143 bp omitted]ggaaaaggcaattcctggattctcccccagagcccccagaaatgaacgcagacctgctgacaccttgagtttagcccagtgcaacccatttgagactcacgactcccaaactgtaagacaataaactgacactgttttaagccactgcgtttgtggtcaattgttatggcagcaaatgggaagctaacataggtggtgaggaaagtttcgctgaggaagtgatatctgagcaaagcatggaagaaagcaggggactgagccaggcgtgtatctgggaaagagagttttaggctgggaaagaaggtagtggcccagaggtggaagtgcacctggtgggtgtgggaagccaggatggagcgagctgaggaggagctgtggatgcggctgcagatgtgatgggcgggggaagagaggagcagcaggaggggcctgggaggtttccacaaggcctggctttggcctgtggtggtaataccagggggtttgggcagggagtcacaggacctgacctcaccactgacagaataagcagcaccacgctttggacatcatccacaaagcaatgaacaagcattaaatgacttaaacaggggaagagagtggtccaatgtatttggagaagttaaaaagccctctgaccacaggagaggctagatatacttttgaacccttatttttttgcttttttttttttgaagcaaggtcttgctctgtcaccccggctggagtacagtggtacaatcacagttcactgcagccttgaacacccgggctcaagcgatcctcctgcctcagcctctcaaggagatagcaccacaggcatgcaccaccacacctggctaatttttaaaacatttttttgtagagatggggtctcgctatgttgcccagcctggtctcgaactcctggcctcaagtgatcctcccacgttggcctcccaacgtgctgggattacagacgtaagccattgtgctgggccttgagcccttgttttaccatcaggcattattctcagatctgtatgtaaatcgactcatttcatcttcccagtcaccctatgaggaaggtgttaccaggagctgcatgttacagttgaggcatccaagacctaacgtggtgaaggagcccacccgaggtcctagggcaggggcaattaggaccaggttgtgtctgcccccgacacaaccaggaaacacatctacctctcccgggcaatttctccagaattctcctgaacagctgctgcactctgttccaaaggttaatgggaattagtttcttctggtaaaaatgggcagggtgatggggacctacctggcctttagcagggctaagggcttcatcctcctcttccccttcgctgcccaggacccgggccgccttcctccctggcctcttcaccggagagtcactctcggacaccactccattccactccttcagtgccgccctggaaggtggggaaatgggggtgtaaaggggcgactacagcaggcagagtgggggcactgcccgcaaacactttggtttctttgctgtttccttcccttcctttcaagcatccaatgaacattttctggttgtctcctcagcaaatctcatcatttcatccatcagtgcattaatccacccgcccactcatccactcacccacccatcacacatctctggaagtctccagagtgcctgccctgtgatgggtgatgctgaggagcaaatggagtccctgcctaaggttgccattggtctccagcatctattgggatgcctttttttttttttttttgagatggaatcttgctctgtcgcccaggctggagtgcagtgggccgagatcacaccattgcactccagcctgggtgagagtgagactccatttcaaaaaaaaaagagtactgttgtcttctacttagatgagacagcatcaagacgtggccagtggccagcggccagcttctctgcattatggagaatgtctggttctagaacgaggccaagacctgcagaaacagagacgtacagacaactccgaggccctggatccagctgtgcctgcagctgctcttgctcttggacttctggccacctggctgaaaaagttttttgggccccaagacattttgcattaggtttgaacacttgcaaccaagacaatcctgactgctaaaggaaaaaattcaccatatcccagccctgtgacatactttggagggggctccgtctctctgctgctattggatgcctccttctcaggcttctttgctttaccctctttcttggggtggaaaaatgacctagaggagcataaaagggggtaaaaaaagga[138 bp omitted]ctcctgggtgcatgccattctcctgcctcagcctcccaagtagctggaactacaggcacccgccaccatgcccagctaattttttgtatttttagtagagatggggtatcaccgtgttagccaggatggtctcgatctcctgaccttgtgatctgcttggcctcccaatgtgctgggattacaggcataagccaccgcgcccggccgcatcctataacttctaacaccatttccatctcagcacataacagagaatttcaaataagccctttaacttaactgataaggaaactcagactcagacaaaggaggcaacactaatttttctgccctaacgcacctgcaagatatgatacatcccaagttttattcaacaaatattaactatgcactttttaaatcttttttttttagacagactctcgctctgttgcccaggctagagtgcaatggtgtgatctcggctcactgcaacttctgcctcccaggttcaagcgattctcctgcctcagcctcccgagtagctgggattacaggtgcccaccacaacgcccagctaattttttttgtatttttggtagacacgggttttctccatgttggccaggccagtctcaaactcctgaccttaggtgatccacccaccctggcctcccaaagtgttgggattacaggcatgtgcccccgcgcccagcctaaaaaaatttttttttttgagatggagttttcactcttgttgcccaagggtggagtgcaatggtgcaatctcggctcactgcaacctcggcctcccagtttcaagtgtttctcctgcctcagcctcctgagtagctgagattacaggtggccgccaccacgcccggctaatttttttcatttagtagagaaggggtttcaccatgttggtcaggctggtctcgaactcctgatctcaggtgatcctcctgcctcccaaagtgctgggattacaggtgtgagccactgcgcccggcctacctaagcacttattatgtgccagggcctgttctgggcctgaggggtttggcagtgacccagacacacgaagttcctgccttcaagaagctaacactctggtgaagggcagaaatattaagcaaacaactaaatataaaatgttggggcctggcatggtggctcacacctgtaatcccaacactttgggaggccgaggtgggcggatcacgaggtcaggagatcaagaccatcctggctaacacggtgaaaccctgcttctactaaaaatacaaaaaaaattagctgggtgtggtggcaggcgcctgtagtcccagctactcaggaggc[170 bp omitted]aaagtatggagttcagttaagagtaatgtactgacattagtatctcagtggtgagaaacggatcatagtaatgtatgatattgacaatggaaactggccaagggtatacaggacctctctgtactgtctttgcaactttcctgtacctctaaaattattccagaataagaggtttatttaatcttcaaaaagaaaaggaaaaatcatgcaaaagccagtggacagaaagcaatcgaaggcaccatcagccctggagagacaatccccagattcctcatcacgggagaaaaacggaacccagcatttgtgtaagccactaccgcccaggtttctgggatggatgcccttgtctgggtctctctaccatccattttttcctcctggtaacagcccctccgttttcctcttgggatgcttcttaccccacattctctcagtacacacgatttgagtgggctggcccttttgcctgtgaccaggggtggacacgtgatccaggctgcatccctgtggctggttcagggataggtatgtggcccaggctgggccagtgaaactgggctctaacaccctctttccaaggggaccgctaagaggggagagcccgcctgagggtgaggacaacctcaaggacagtagagctgaacaatggagagagacagattcccagggaggaagttttggcaactggatcgaaccaagcctgaggctgtttactccagcaggtttcaatgatataagtcaagtcatgccctttcttgtcttcctgaagccggactgcattaacacgaggtttctcaacctagacactattgacatgttgggcctgatggttctgtgttgttgggggggctgtcctatgaattgaaggatgtttagcagcatgcctggcttttagccactagatgccaatggcaaaccctctgtccctaggttgtaacaaccaaaaatatctccagacactggccgggcgccgtggctcacgcctgaaatcccagcactctgggagg[135 bp omitted]gaggcaggagaatcacttgaactcatgaggcggaggttgcagtgagccgagattgcgccactgtactccagcctgggtgacagagcaagactccaactcaaaaaaaaaaaatctccagacgctgccagatgttccctggggagcaaaattgctgctgactgagaaccactgcgttagggtttctgctccttgcaactaaaaactgttgttcaatacactgtcttccatatcccacggctcattttccatactacttgactcctggaaattccaactcaaaatctaacgtaagagtttttgtttgtttgtttgtttttttaagtacagatttagagaaagaaacagaggacttggagaaggaaagactcaggggcaagggagggtgctcacatgatacttcgctgcatgttggcgtcagaattctcccttcctgtccagcacttttcttcgtctgtcagctgctcctggaacagaaatccaaacacttgttgaggtgattggttgtgcagagatctaaacacacataaaaccctttctttaagaaagaaagaaaaaaaaaaacagaaacatgaatttccccttcaaaaagaaactcctgtttttatgaaccaaaataatttgctggtgagatttactggtgcagaataaaagctccaaatcagagaaaaagataagaggcctcctttaccataagaagactgtttttcatctaatatgaggaatagactgaggacctgaaatgggtttttttggagttaagtttaaaggttagtgaaaaattgttttaaggtgatgacataattccgtgaaacaactgtggaagcttataaaattgtacccgctggtctacataaattagctcttgggcagtttctaaggtatgctgttatttcaaacaaagggcagaatatcacagagtgtgtgctactgaactgtgtaaaagagaaaggctataggtcaggcacagtagctcacgcctgtcatcccagcactttgggaggccgaggtgggtggatcacttgaggtcaggagttcaagaccagcctggctaacatggcaaaaccctgtctctactaaaaatacaaaaattagccaggtgcggtggcacgcgcctgtattcccagctactctggaggctgaggcaggagaatcgcttgaacccgggaggtagaggctgcagtgacccgagattgtgctactgcactccagcctggacaagagtgaaactccatctcaaaaaacaaaaacaaaagaaagactataaatgtatccacatatcttgtatatgtacagaacatctcagttggaagacaaaaaactggtaatgctgtcgcctcaggagggacagacgctggagggagattttttaatatgcatgcttttgcaggcagaacaattggaatacgttaccccttcacaatatatttttaaaaattaaatacttttttaaaaagtctgttatttaatgaaatcaataacagtcactggggcttccacagtttagagtaactctaatgaaagggttcctaggccgggcgtggtggctgctgcccataatcccagcattttgggaggccgaagcgggtggatcgcctgaggtcaggagttcgagaccagcctggccagcatggtgaaacctcatctctactaaaaatacaaaaattagccaggtatggtggtgcacacctgtaatcccagctagtggggaggctgaggcaggagaatcacttgaacccaggaagtggaggttgcagtgagatcatgcactctagcctgggcaacagagtaacactctgtctcaaaaaaaaaaaaaaagaaagaaaaagaaagaaaaagaaaaagaaaagaaagggttcttaatctggggtccacaaaacccaggagtccaagagcagaactcaagtggtctatgaaatttgacaggaaagaaattacgactttattcttgtaaacttctaattggaactgagcctttccttccattataaatattaaagatataaaaaattataaattttctatatctttaatatttataatggaagaaaataaattacacattataattatgtaattataattatttacattatatttccttccactatgaatatattttttaaaaaaggactagcaggacctctgcgtggattgcttgagttgagaccagctcagaccagcctgggcaacagaaatggttttctttgactttcccttcctttgcacagaaatcttcttcaacccatggggtcccctttcgttttctggaatcagtactctctgtcccgcaccacacgcctctaagtctccactactctctacagccttggccgccacatgttggcaccacaactcaaactcaattttggaatcaaaaaactcagtaggccggcactgtggctcacgcctgtactcccagcactttggaaggctgagacaggcggatcacgaggtcaggagttcaagaccagcctggcccgcatggtgaaaccccatctctactaaaaatgcaaaaaattagccaggcatggtggtgccagcctgtaatcccaactactcaggaggctgaggcaggagaatcacttgatcccaggaggcagaggttgcagtgagctgagactgcaccactggactccagcctgggcgacagagcgagaccccgtcttaaaaaaaaaaaaaaaaaaaaaaaaacaaacaaaaaagaaactcagcaatttccaaacagagtttctcagggccagttggggagcaggaagtaagcaatgcttcaaccaaacagttcacacagaaagcaggttagggacttagccaccaaaatcctgagggcaaaggagaaaactattacgatccctcctgagtgctcaactgcctaggtacttgacattctcaattatactgactctccacaacaactctgttacagaaactaaggcacagaggggttttcaaaggaacttaacctgcatctatagtacgttccaccccaggtcggcctgctccacagctcacctcttaaccaccagactgagttgcaagggaaggagaaatacataagcgtttactgggaagcctactctatgcctgacaggctgatcacattctcaaataccctcaatcctcaagtcagccctccaagacaggtgagatcatccccactttatagatgaaggtaatgaggacagaggaacatagctggggttcaggcaaggcttcaaaacccggtgtggctggctccaaagcccacgttcctttctccttaccacggtactcaaggctggcttctcaactctgtgtactgctgagttggggggaacaaactggttgatgcctctggaggaccacctggcgtctctatcggaacggcaaccccacttctgtgtatttggcccacagagaccctcacaggtggaccaagtgaggcacaaagttacctgctgcagcactaactgtaatgagagaagactggaaactggtggaatgtctacccttagggaactggttccctcattactggaataccatatggtagaatattgttcagggttaaaattaaatgaatgatggataaaaggtataggagttttttggggggatgataaaaatatcctaaaatcgattatggtaataactgcacaactcagcgcatacactgaaaaccactgacttgtacactttaaatgggcactttaaatacactgaaatacactttaaatacactgaaaaccgctgacttgtacattttaaatgggcaaaattgtacactttaaatgggcaaactgtataattgtgaattatatctcaataaagcggttaccaaaatgaagagataatgacaggaaaaatatcaagtaaggatgaaacagtactcagtaataaaaagaaacgaagcactgatacaagcaacaacttgggtggacctccagggcattgtgcagagtagaaaaaaggtaacatcctaataatatatgattccatttacataacaatctccgaatgacaaaactagagatggtgaacacattagcggttgccaggggcctggggaggagttcttatgtggagagggaactgttctatatcacaattacgatgggggttacacaaatctatacaaggaatcaagctgcacgggcacacagatgcacaatcacactcacaccacacaaactggtgaaaactgaacaaggtctgtaatctagttaacagaactgtattgatgtcaatttcctggtttcgatattgggactacataagatgtcaccattaggggaagatggatatactcttttcacaacttccttgaatctataattatttcaaaataaaaagtaaaaacaagaggtaagctccatccctttatcaagcatacattaggccagacgtctccccattcagatgattctccatcttttacgagccctttacctagacctggaccttaccactgacctctccctgacaccacccatctccctccagtagggcccactccttccaggtgatgctgctgcccgcgatttaccttcttctagccccgccccctcagcacttccaggtggcccccgccccctcagcacttccggttcccagccagccccacccttggcacctcccccttccaggtggccccgcccacacgcaatcttttccccggccccgccccttagctcccttcagcccctccccctcccagatagccccgccccctcggggggccttccgatttccagctggccccgcccacacagttttcccccccccggccccgcccctcagttccatttggcctctcccctttccaggtgaactcgcacctcaaggcctcttctcagaggacctgtccaactgtctctgtctctcgtctaccctctacctggcccccctccctctgggagacacctctctgcactctccggcggcccgcagcccgcgctcttccgtctccaccgcgctctcggcagcctcagcgtccccacgcccactcctctgcagacaccccgacatggcgaagcataggccccaagcattcggcgcacccgccgccctccgcctcccatctgcttgcggacggccccacttgccttgcgttggtcccgcgcgccgctgcccgggcaacacactcagatccgccaggcgcgcctctgcagtcccaagttcgcgccacggcattcgcgcgcagacgtctgcgggcgggggcggggcagagcctaggggcgggacctgggcaccgtccgcaccgccgccgtcgcgcggaggacactgggagtcgtagtctcccgaatgggaggagggcgggaaaaggggtgaagtggggcgagccctcccgcagagcacactgggaaaatgcccgcgctttccctcgccctggatgagcgggtgtggctgagggtctgaggagtgactggcagggaaagaggaggaatcggtggaagcgcccccgcgaggcacggcgggaagagaggcgggagaccgcgcggggcatcccgggagcaagggccgggccaggcctgggcgcggggcattgtgggaggtggacgccgctccggggcgggtaggtgagtggggaggggcgggaagggtgcacatcttggggaggggagaggcacagctaggtgggacggcggggctggaaggtgccgcagcgggcggggagggggggagtaggagggtcgggagcgggctggatggggctgctcgaggggagacgcgcagctggacgtggggggagcatctggggtgaaggagcccatccgaggacgaggggccatgtctagaacgaagatgcatattgcgggggatggtggatgtaactgggaggaggggcccacagctggactgggggccgcatctgaggaggaggggaccacaggtgaatactggtgacacttccgaggagaactagccacaagtggggcacacacctgtaggcgaagcgtggataactgcatgtggggagtacatctggagatgagagtgtctcagggaagccccagctacagctgcatgtggcgagccatagggtcataatcgggggaaggggcaacagctgcacgccagaggcacatctggggagtgcggagccacaggtgcatgaagcatgtgaccgggtgaggggtccgtggcctggatgtgggagcacatctggagatggagcgtctttggaggggttacagccaactgttggcacatggaaggaggagttccagatgaatacgagagttagaagttactcttgggtgagagacacagctggaaggggaggaggttttagctggaatttgagaacacatttgaggagatgtccttaagggacatctgagcttaagggtcgtattttgggaggagagattccaactgtacctaagggtcacatctgcggaggaggagacgagttggaattaggaatcaagatgacaggctccaagtgaaccagggataaggcggtgggaggaggccaaagataggatggaggttgatatttatatatttggagaaaaacaggcacgtccgaccccgggctacccacctcgatagaggcaccagcaaccgacggggcaggccaagaatggagtagatgagataccccgggtgggaatgggtctgatatccacctgttctcccctcctccacgcaggcccccaggatggagcggccggagcccccacccggcacggctgcggggcaggaggagcaggagctgcgggagcgggccttcttctcgtgggccgagttcagccgcttcttcgacgcgtggtgccagcagcggctggcgctcttcttcgtcaagagctccatgcacctggcgcgctgccgctgggccagtgcgcccccgctctacacgctcatcgacgtgctcaagtacagctacgtgcggcttgtgtgcaaggacgtgcgtgcgcccagccggcccgccgtggggtgcgtgaacctgagccgctgtcctgctggggggaaggggagcaccgggggtgggtgtgggtgggagacgggcagagaacaccccacccagagatgcagagggggagaggccaactgaggcagccaaatacaccttgcagagaggcgggagtcaaggagggacatgtactgagagaagaagaggagctagagagacaaagatactcacggagcaagagatggtgtgggcccgacttacagacttttttttttttttcgagatggagtctcgctctgtcgcccaggcttgagtgcagtggtgccatctgcagcctccacctcctaggttcaagtgattctcccgcctcagcctcccgagtagctaggactacaggcacctgccatcatgcccggctaatttttgtgtggttttttgtttttgtttttgttttgttttgctttgtgttgtttttttgagacagagtcttgctctgtcactcaggctggagtgcaatggcacaatctcggctcactgcaacctccacctcccgagttcaagcgttgtttctcctgcctcaacctcctgagtagctgggattacaggcacgcgccaccacgcctggccaatttttggatttttgtagagatggggtttcaccatgttggccaggctggtctcaaactcatgacctcaggtgatctgcccgtcttgcctcccaaagtgctgggattacagccgcgagccactgtgcccggcctgacttacagaatgtaatagagacttcgagaggcagagcgtaaaacacacacaccccaagaggagaaaatagtcacggaaaattccagaaacatggagacatggaggcagagacaccagagacagccagggaaacagaagagccaggttttgtacacgtgacaaagactgggagacagagactgggagactgaactgcagagaagccgcaggataaagaaaaggatccatctattcagtgaataaggggccaggtcccatgctgtgggctggggatattctagttggagcgatggagttgggcaagagacaaaaatccctgcccttctggtactttctgactggacagaaagattgacgttaaaagaacaagctcacaggtagttccctacaactgtgcaaagaggggcaggtgagaaatccaggagagccagaatcacacccaggtggccaggggtattttaatggaccccaattgtattttatttagtctttatttttttgagacagggtcttactctgttgcccaggctggagagcagtagtgcgatcttggctccctgcaacctccaactcctgggttcaagagattcccccacctcagcctcccaagtagctgggactacaggtgtgtgccactatgcccacctaatttttgtatttgtagtagagatggggtgtcaccatgttggccaggctggtctcgaactcctgacctcaaggaggctgaggtgatctgcccacctcggcctcccagaatgctgggattacaggcatgagccaccacacccagccaaattgaccccaattttattttactttattttattttattttatttgagacggagtcttgctctgccatccacactggagtgcagtggcacaatctccactcactgcaacctcagcctcctgggctcaagcaattctcctgccttagcctccccagtagctgggattacaggcatgcgccaccatgcccagctaatttttgtatttttagggtttcaccatgttggccaggctggtcttgaactcccgacctcaggtgatctgcctgccttggcctcccaaagtgctgggattacaggtgtgagccacggtgcctggtctgaccccagttttaaacaggggttgttccccacacagttaggtttccagcttccactggaacaccggaagaggtgagcccatgtttccattggcagacggccacccctcttggatggggctttgctgcccaggtttgccccaaaccctgccactctctgctgcctcatccctagcactgtcttttgcttgttttgcctgcctggtcccagtaggtgtgtgagtttgagacccttggttggggagctgtagacaagaacagagtgcttaagaacacaggctctgcctttaggctgcctgagacatgctccacgacttcctggatgggtgactttgggcaatggacttcacatctccaagcctcagttttctcatcctttgaaatggggttatcacgatacccgcctcatggggccattgtgaggatactgtgagatcatacatgagaaaaacacataaccctggtgcctggaacatggggtggctggttaagtgatagctgttacaggattcgagagcatggactctgggccattgtgctgctgatgcttggtggatgctgttgagtgagtgacttcacctttctgtggcctcagtttcctcatgtggaaaatgggagacataatagtgtctatctcataggtaaattattcagaaaggcatccagcacagagtaagcacactcttaacagctctttcaccggtagttatttaaacatgtattgtgaaatacattcttgcaacttctttctcactacttattctagaaacagagactcggagatctgaaagtggaacagcatcaaacacacacatcacccagaaacctagaacgttagagcttgcaagaagctcaaagaagctcaggcctaatctgaaacctattaacagaacccagttccaatgtaacaaatgcttattgagcacctactatgtgcatgcccttcactggacgtttagaatccgagactgatctcggctcttgaacagttcagaacttaatggggtagacaaagaccaaaaaacaaaaaaaaattatagatagtggcccatagtagtgagagtgagattgagggggagatgagaggaggatacaaagggagtggtcagctccacctgaaagcttactgggtggttctggaaggcttcctggaagaggtaaccagtaagcagaaccttgaagaattttgttgatatgtttatgtatgtatagtatgtgagctaacagacacactaggtttactatgtgcaggtactgtcccaagtgctctacaaatatcagagacagccaaggagcaggagagacaggactatggagggggcgaggacagggccctgggtacactcctgggactgggtagatgatgagatggtctctgaatggggagtgcgggagcaggtggttgatgagccggttcaggaacgatatcttggagccgtcatgtctagctccctcactctctcgagctgctcaaagcagagcctctccagtgccacagcccagggacagcccatgggccgaggtcaggctggagaagttagtgtgtaaggaaaggcaggacatgaggctgcagtggtgtcaagggctggatctggcagggctgagtacaggagttgggactttatctgggggtggtgggagccctagaaggctgtgagtagggtcagttctgggtggaggaagatccctctggggccgtgtgggagacgatgtgggggagagagaagggatatgaaggaggaggctggggctgagggtgcaaggaaccagacaagaactttcttcctgtccactccttcccccttgccagaggttacacagtgactctcttgaagtcaccactgctgcagcttcagctctccagctccagttcctcccccatccctctctctcagcacttccctccctggaacagaattgctcagcctttctcaatacacaccggccgttgaaaacataaagatcttgaaaacctgaacgatcaagaataaatgggtagtcgggtgcggtggctctcgcctgtaatcccaacactttgggaggccgaggcgggcagatcacttgaagtcaggagtttgagaccagcctggccaacagggtgaaaccctgtctgtactaaaaatacaaaaattagccgggcctggtggcaggtgcctgtaatcccagctactcgggaagctgaggcaggagaatcacttgaacccaggaggcgaaggttgcagtgagctaagattgtgccactgcattccagcctgggcaacagagcgagactctatctcaaaaaaatgaataaatgggtaagtggaaggcaaatcaaagcaaagcaacgggtccttgaaaaaaagtttaaaaaaatagcaggtactatttctgcattgtttactatgcactagcccatttctaaccactttacataatttaatcctcttatttagccctctctacaagcctgagagactagtattactattggccccactttccaggtgagaaaactgaggcacagaatgcttaaagattgttcccaggataacacagcagctaagagggaaaaccagggtctggaccctcattctggttactaagcccatgattttaattaccaccctcccgcctttctttctcactttctctttctctctccttccctcatctttatttcaatcattcaaccctcagtgtgagggttgaccgtgccatggatcccctaaagatgtgttgtttctgggcaccagcctatccatcccttcacccaagaggtttttgggagcccctgcaatgtgcaaggtggtggttttagatgctgggatttctgtggggagcgtacattacagatggacataaataaaaatcccagccgggtgcggtggctcacacctgtaatcctagcactttgggaggccgaggtgggtggattgcctgagctcaggagtttgagaccagcctgggcaacatggtgaaactccgtctctactaaaataaaaattaaaaaaaaaaaattagctgggtgtggcggcgtgtacctgtaatctcagctattcaggaggctgaggcaggagaattgcttgatcctgggaggcggaggttgcagtgagccaagattgtgccactggggacagagtgagactccgtctccaaaaaaataaataaataaaaattaaaaaaaaataaaattccctacatgtgatggaccatgccctagccaggatatggtcagggaagacttcctggaggaggcgatgctggctgtgaggcctgaaagatgagtaggagttgactaggtgaaaagggagaggaatgttttatgaaggagggaagaacttacgataggttgtggcaatggaaaaaatgtggatgggtaggacgtggtgatggatggttttggtggaatggagaccatatcccagagtaggtgtgccagggtttgtaggttacatcgtgggatttagtcactgaatcatcacacacttactgaatacctccagacgccaggtactattctaggtgctgaggatacagagataaacaaaatagacaaaaattcctatccatgtggaatttacatttagcggggggatgacattattcctccagacaggtggagagaaattggaaaaatggcgtgttgaagcaccagtaggtggttatgtgagattctgggcccctgcagaggagatgccctattctctggcaagattcatggcttcacagaagaggtgacctacccggagcaaggggctgtcctagggcctgaaacacctaggctgaaggaagtcagacaagggtttcacaaaagcccacgaattattctagaaaaatgtacggggtggcataccgtgaacttgcaatcttgataaatcaaacatggctgcacgcggggatttcctttgcttccacctgataccacatggtggctgtatgtttattttattcatatttatttgtacattgaataattttctaaatgtgcattatttttgtattttttgagatggagcttcgctcttgtcgcccaggctggagtgcaatggtgtagtctcagctcactacaacctccatctcccaggttcaagcgattctcctggctcagcctcctgagtagctgggattacaggtgcccgccaccacgctcagctaatttttgtatttttagtagagatggggtttgcctatgttggccaggctggtctcgaactcctgacctcaagtgatccgcccgccttggcctcccaaagtgctgggattataggcgtgagccaccgtgcccggccttgttactttaaatgaggcataaagtctcaaactctgtatgttgattcttaaaatctagcaggctcctgcgtttttcttcacctcgtgcatgtaggaaaaaaggggtgtgtcaaggatgcccttctggtttaacaaagaaaatttttaagcatttatactggtggatttaagcatttctctgggtggatcctggggagaatcacccagttggggggccatttggaaaaagcataggagggcttttagggggtgtgttactggggtatttactacctgggagccagggtttcttaactacataccaggccccgggcagtctgtgttacaagggtcagcaaactagg[152 bp omitted]cctcctgagtagctgggactatgggcgtgtgccaccgcacctggctaatttttgtatttttagtagagacagggtttccccacgttggtcagactggtctcgaactcttgacctcgtgatctggccacctcagcctcccaaagtgctagaattacaggcgtcagccaccacgcccagcctgtagcctatttttataaatgaagttttattggaacatagccatgcctggtcatttacatacgtctatggcttcgtttgcaatatagcaacagaatatattaaacatttactacctggccctttgcagaaaatgtttgacagctcctgctgtataaacataaaatctgccaaaaaatgctgatattaccccacatggagaaacactgaacccctcttcagaaatcagatgccaatttaaatattactatcagagaaatacactctgatttttttttcctattccctttcttttattttcttttttgagacaaggtcttgctccgttgcccaggctggaatatgatggtgccatcatagctcactataacctcggattcctgggctcaagtgatcctcttgcctcagcctcccagaatagctaggactatgggtgtgtgccacaatgcctgactacttttttatgttttaattttttgtagagaagggctcttgctatgttgcccaggctggtcttgaactcctggactcaggtgaagtgatcctcctgcctcagcctcccaaagtgctgggatgacaggtgctagccactgcacccggccctatttcattttctacagtgttggttgcaactctctacattaatttcatgtaatgggctatgctgtgcagtctgagaaccgctgtcctagacaaactcttgctcacacacataaagagatgtataagagagtgttgtatcacacgttggggtgattgaagcatcattcgtaacagaggagaactggaaacaccatcatagatggcagagccgtggagtggaacattcggcagcagtaaaaggaatgaaactgaacagttttgaaaatccgagtgaaaagccagctgcaaaggcatctgtaaggtgggatgattgtcttagtctcaattgatgtaacaaactaccacaaatatggtggcttaaaacaataccaatttatttatctcacagttctggaggtcaggcggccaatatgggtctcagggctaaaatcaagacattggcagtgctgtgttctggaggctctaaggagaatctgcttccttatccttccagcttctagagaccacccatgctctttggcttggagcctcttcctccatttgttttatttatttattctagacggagttttgctcctgttgcccaggctggagtgcagtggtgcgatctcggctcaccgcaacgtccgcctcctgggttcaagcgattctcctgcctcagcctcccaagtagctgggattacaggcatgcaccaccacgcctggctaattttgtatttttagtagagaccgcgtttctccatgttggtcaggctggtcttgaattcccaacctcaggtgatccgcccacctcggcctcccagagttctgggattacaggcatgagccaccgcgccaggccattcttccaattttttttttttttttgagaggtaggggtctcactagtctcactatgttgcccaggctgaactcaaatgatcctcccagctcagcctcctgagtaactgggactataagcaagtgccactgtgcctggctcttcctccatctttaaagctagaaggtagcatctttcaatctctctctgactttgatcctcttacttccctctttcccttataagaacctttgtgatgacatttgggcctacctgggtaatccagactctccccatctcaagacccttaatttcatcacacccgcaaaggtcctcttgccatggaaggcagcatatgcacagtttcagtgactatgatgtgaatattttggggaaccatgattcttgctaccgcaatgctcggaaacaaagagttttctttttctttttttcttttttctttttttttttttttgctttgagacagggtctcgctctgtcaccccaggctggagtgcagtagtgcgatctcggctcactgcaatctctgcctcccgggttaaagccattctccttcctcagcctcccaagtagctggaattacaggtgtaatcccattagcctattattagccagcacgcctggctaatatatatatatatatatttttttagtagagacagggtttcaccatgt[137 bp omitted]acacacatccagaaaagtacacacatcatatgtgtgaaactgaatgaattttcccaaaaaaaaaatcagaggtaaccagcacccagaacaagaaacagaatatgtccagtcccaagaaacctcctggtgccccctcacagggttaaccacttaagggtaaccactatctagcctcctaacgatagaggttaactttgcctgctgttgaactttatataaatgggaattatatcagtttctctttcatgtctggcttctttcacttggtaggtttgtgagattcatccgtgttgttggaggttgtaatggtgtgttcattcttggtgctgattagtgttttattttaggaatataccacaacttattttctcactctattgttggatatttaggtttcaagtatttggcgaatacacatagtgctgctatgaacattctcgtacacagctttagatgcccatttgtcttgagtggcaccactgggtcacaggagagacataaaatttgctttagtagatactgccatgaagttttccaaagtgcttgtgccatttcacgttcccatcagtgatgggtgagagttccagttgctccacgtcctcatcaacacttgatgttatcagtctcttttgtttgaccattctgctgatgtgtagtggcatttccttagggttttaatttgttatgtctttgatgactaatgagtttgagtcctttttcacgtatacaatgcttttaacacacagaaacatacctcccattgtttatgggtgcataaaaatatacatggaatgctaatagataattttgatagtggctgcctctggggacagagggaaggaagataatctgttagggcagcgttcacagaaggcctcaacttttgatgttattgctaaaccagaagcagatacaggactatctgaaattttttatttctaaaaaaagttaaggtaaatacaataaaacattcactcacttttgacagaactaagggtggtaggtatagaattttagtgaacacttactgcttgccatattccagacactgtgtaggtgctttacctatattaactcttttcatgctcatgacgatcctatgaggaaggtatgatgagtaggaccttccttgtaacctatgaggaaactgaggcatagagacttgaagtgacttgccccaggtcacacagctggcatattcttagggccctctactcttctctatgcctgaaacaattcttagtttaaaaaaaaaaaaaaggtgagtggaaaggaagaagagggcagcagagtgatgtgaccagggcggtggtggttcctcccacaggcctccccagcccggctgccccgccttcatcatcgtcaagctgagcccgctgcgggaccgcctcgtggtgacggagtgccagctgacccactcacacccggcctgcccgctggagttcgcctactacttccgcccgggccacctgctggccaacgcctgcctgccggtgcgcaccaccaacaagatctccaagcagttcgtggccccagccgacgtgcgccgcctgctgtcctactgcaagggccgcgaccacggcgtcctggacgccctgcacgtgctcgagggcctcttccgcaccgaccccgaggccaaggtggggtctcgagagaggcaggccgggggagggggcgggggaaagccgcgctgaagactcgtgggtcattcatgccttcatccgccctctcatcccttcactcctttcctccattcatccgttcattcattcaataagtacttaccgaggcattggggatgcagcagcaaaccagacccacgtggtctctgtccgcagagagcttaccttctagggtagtgctgcccagtagaactttcttccaggatggaaacgttctgtgattctgcacccccagccacaagtggctactgagcacttgaaatgtgtccagtacactgaggaactgaattaattaattaattaattaatttttttgagacggagtctcactctgtcacccaggctggagtgctctatcacccaggctggagtgcagtggtgcgatctgggttcactgcaacctccgcctcccgggttcaagcgattctcctgtc[136 bp omitted]gcctcccaaagtgctaggattacaggcgagagccaccacgcccggcctgaatttattctaattaattgaaatttaaatagccacctatggctattggctgccttgcagaggtaactgccagaacgcccctgcagttctggcgggaaaaaccaacaactgacaaacatgtccaaatatgatgtaacatcactaggggctggctgggtgctagcaagaaggggagccacagtgatgacaaatgctatgtaagttttttttttttaatcttttttttttttgagacaggatctcactgtcacccaggctgagtgcagtggtgcagtcatggctcactgcaccctcgatgtcccaggctcaagcaatcctcccacctcattctcccgagcagctgggacaacaggcgtgcaccaccacacccagctaattttttagtttttgtagagatgtttggcgggggggggtctccctatgttgcccaggctagtcttgaactcccagactgaagcagtcctgcttcggcctcccaaagtgctgggattacaggcatgagccaccacgccaggcctacttaaatttttttttttttaattgaactgcacaaacagaaaatgcacaaatgataaatacttagtttgatgaatgttctcaaggggagaacacacctgaacccaccatgcagatggagaattaggagaaggaagagtgctatgtcctgtaatgtgatggagcgataagttatcatcaaggagaaaaaggccggggcctggagcgggacagttctaagggtgctgtttgaattggtcagggaaggtctctttagcaaatgatggtgaagcagaggagatggaacagaggcaagggaccctcattctgtcatcagagggaagagaattctaggcagaaggaacagccagtgcaaaggcccagaggcacgagcaagcttgtgttggaggaacagtgaggatggctgctgctccataaggaatctctgcggctttaatccaacttcaagtttggggtgaacttgaagtttaaagaggaaagaaagatgagaaagtaggggaagaactggtttctcctcctggctgtgcctttgtctcccttgtgtgtggaagaggtcccaaggcagggtaaagtcgagattcagctctggcacactcttcctgtcttcatctcatgcccagtaagaagccctgattcaagccaccagcccaagcccaggcctctgtcccgacataataataattttagctaatgtttatcaagcacttactatatgccaggcactaccctaagtgctttacatactataactcattttcatctcacctgagccctatgaggaaatagtccaccattctcatccccattttacagacaaggaaactgaagcacagagaagtcaagtaactggctcaaagtcacacagctatttagtgacagagctgggcttcggacccacacagcctggatccagacccatgaccttcaccatggggacaaacacacatgcacttcctactccactggtctttgctgatctagtaactctcctccactacccaccatgacataaataagcctcagctgttcttccctgaacccaccctctgcaggattgtccctgtgcagaacagctcattcatagatcagagccttccctggaaggggagttgtcttttcattttgaaggctgtcttggaatctcggctaaaccacggttggctcctgcgtctgtgttttgacctgctttcatactttttttttttttttttttgagacggagtttcgctcttgtcacccaggctggagtgcaatggcggaatcttggctcaccgcaacctccgcctcccgggttcaaacgattctcctgcctcagcctcctgagtagctgggattacaggcatgcgccaccatgctaatttttgtgtttttagaagagacggggtttctccatgttggtcaggctggtcttgaactcctgacctcaggtgatccccccgccttggcctcccaaagtgctgggattacaggcatgagccaccgtgcccagccccttaatgctcttgaaagaaaggaggaagaagttctaggacaggagagacagattagtgaagcaacatttaaatatttactttttgaatatgtcatacattcacatggttctaaaaaaggtatgtggtgaaaagtcttatcacatcctgtcccccaggtcccctcccctgcagagttattagcagcttataaatcatatctcgctttctatcctatggaccagcactgcccggtggaactttctacaatgatagaaatgttccttatccaggctaggcatggttactcacacctgtaatcccagcactttgggactctgaggcagatggatcacctgatggcaggagttcgagaccagcatggccaacatggcaaaacctgatctctactaaaaattcaaaattagccaggcatggtggcaggtgcctgtaatctcagctactcgggaggctgaggcacaagaatcgcttgaacccaggaggcagaggttgcagtgagctgagattatgccactgtactctggcctaggtaacagagtgacactcttgtctaaaaaaataaaaagaaagaaaatggttcttatctgtactgtccaatccagaggccactggccacacatggctacagaatgcttaatgaggccagtatgactgaggaactgaatttgtcatttaatttatcgaaatgtaaacaacctaatgtagctagtggcttctggattggacagcgcagctctgcacatatacaggtcaatttgcatgtctgtatgtttaactttaatttttaactttatttcctctttctgccccgccaccccccacccccagcaagcagggcagcctagtgtacacgctgtttttgtttgtttgtttgtttgttctttgagacagggtttcactcctgtcacccaggctggagtgcagtggcacgctgttggctcactataacctccacctcctgggctcaagtgattctcctgcctcagcctcctgagtaactgggactataggcatgcaccaccatgcctggctaatttttgtatttttagtagagacgaggtttcaccatgttggccaagctggtctcaaactcctgacctcaagtgatccactcaccttggcctcctgaagtgctgggattacaggtcggggccaccacacccggcctgtacatgctgttttgcatcttgctttatacgttggggagtgccagatgtcaccatctttcgttcttcctctggggctggtcaaatccccctgagaaaactcctctggcctcctggcggggggtgaaggccaggctgccagggccaggctgccagcttctgggagctgcaggggcagaggcagggagctgtcaggcattcagccagcaagacgcactcagtacccacttggggttcagaatccccctccctcatcttcagatgggccagatgtccccaaagccagcggcccctttctgtttcaccctgtctacagaataaacccccagtcactgggggtgggggaagagtaaggggagaggggaaacgagatttggaggtctagctgctgctgaaacagccctcagttcgtctttattttgccttctgcaaaactggcctggtgttgccagctccttttgaggactttgctaccggttctcagcatccctcaattgctggcttaggattcatgggtttttaggggtggggtgggattagcatgtccagctgctttccagtttccaaagttctgtccctatcatattgcctctgatttaaaaaaaaaaaaaagccattttaaaaaaaagatgtaattgaggttcaagagagagtgaaactagagaggtgttcaatccatcacttttacacagaaatttcacctttttttcacttataaaatctaatgaaagagttctatattattatgttaataatacagtagtaatataacagtataatgtaataattaatatattatattaattatatattataattatatattatattatattatatatattatatattatatattaattatatatattatatatattatatattatattataatatattatattatattatatatattatatattatattattattatattatattatatatattatatataatattatatatattatatattatataatataatattatatattatattaatattataatatgtaacgcataacatgtaatattgataatataataggtgcgatggctcacacctgtaatctcagcactttgggaggccgaagcgagaggatcacttgagcccaggagttcaagaccagcctggccaacataacgagcacctgtctctacaaaaaattaaaaaaaaaaaaattaggcatggtggcatgcatctgtagtcccagctactcaagaggctgaggcacgagggttgcttgagcccaggagcttcaggctgcagtaagctatgatcacaccactgtactccagccttgacaacagagtgagaccctttaaatagatagatagatagatagatagatagatagatagatagatagatagacagacagacagcaagctttaaattttcatcccaagcctaggtcaagcaacaatcagtctttccacttcccagcagtcttccaaaggaaggattatttgtaaaaagtgcctgcacttcctgagttgggttgctctcttgatctttggaggggatcagacaagaaggatgcgcccaaagccacaaggcatgatttaagggcaagactggggggcgacttcacccagggaggtgttaatacctttttttttttttgagatggagtctcgctctgtctcccaggctggagtgcagtggcgcaatcttggctcagcacgacctccatctcccaggttcaggtgattcttgtgcctcagcctcttgagtagctgggactacaggcgtgcgccaccaggcctggctaattttgtgtgtgtgtgttttagtagagatggggtt[148 bp omitted]ggggtccagtcacatctccattccctcacttgtggcaggcaccagggtaaccagcaagcaagccctgaaaagagagaccttgcccggaaacgttgcagcgttctcttacgtgtatgctttgccttctgagaatggcgagcattgatgcaagtgtatcccttttaagaatactcaat[184 bp omitted]gaggcaggagaatggcgtgaacccggaaggcggagcttgcagtgagctgagctcacaccactgtactccagcctgggtgacagagcgagactccatctcaaaaaaaaagaatactccatgggaagctggtatgatctcagtggagggcaatttagcaatatctatcaaaatgacaagaacactcacccttaggctcacaatcccactactggtgatttatcctgcagatgtagttgcacagctgtggaaggacttacttacaaggttaatcattgttgtttgtgaaagcagcagattagaaacaacccagactccaccaacgggtaatggttacataacttgtggtatatccatccatggattactacacagcactaaaaaagaatgagaactttgggaagccgaggcgggcagatcacaaggtcaggagatcaagaccatcctggctcacatggtgaaaccctgtcactactaaaaatacaaaaaattagccaggcatggtggcaggcacctgtagtcccagctactcgggaggctgaggcaggagaatggtgtgaactcaggaggcgtagcttgcagcgagccaagatcgtgctactgcactccagcctgggcgacagagtgagactccatcctaaacaaacaaaaaaaaaagaataagaacaagtctaggaactattttgaaagatctctcaaacacatttttaagttaaaaaagcaaaatgcaaaactgtacataatatgctgtattatctataaaatagagcaaataagaattataggtatgcttacttgtactcatataaagaaactctagaagaataccaagaactgtggatgagggtagaatagtgaatggaaactgactgattagactaaagaggtgggagtaagaccttttatgtatcgctttacattatttgactttaggaccatgtggatgtttgcatattcaaataattaattcttaaaaagaagatgaaaatagaaggtgggcgcagtggctcacacctgtaatcccagcacttcgagaggctgaggtgggtggatcacttgaggtcaagagtttgagaccagcttggccaacatggtgaaaccccgtctctactaaaaatacataaattagccaggcatgctcgtgggtgcctgtagtcccagctactcgggagactgaggcagaagaatcacttaaacctggggtggcggaggtcgcagtgagccgagatcatgccactgtactccagcctgggtgacagattgagactccatctcaaaaaaaaaaaaaagaaagaaaattaagcaatagtcccaacatactaaacgcatttgtttctctcctcaaaggaaaaattagagggcgagttatagagggtcttgaggttgtgtgagtcaggatggcctaggttttgctgtaataatgaacagccctcaaatctcagtggctgaactcattgaattttatttcttgctcacttacacagccaccacgggatgttgggggagtactgtttatctgagtcattctgggacccaggaggatgggcattcagcccaacgtaattaccatatctggcagcggtggctgcgaaggcttctccttggatgcgatgccgcagctccctcccactcacacttgattggccaaagcaagtcacatgacactgcttacctgcaagggggcagggaggtgcaacgctactaagtgcccgggagagggagaactgcaatttcttggcaagcggcaaaagataaccacagggtactgtttcatcaagggccgcccaaagccctgtctgaatatggggctcgtgtttcccctgctatgtagttacacaggcctcctgcagcttagtttcagcttttctagtttttcatggctcccagagggaatattttctatgccgtatagcctgttttcacatgaagccattttggggtgttatagtaacagctggtgacttgattttatttatgttgctatgtgctgaaagctttatgaatgttctggctgtgccagttactagctgtgggacatggaacaagttatgaacaacctatttaccttctccaacccttagttcatttatctgtaaaatggggataatactatcttatagggctgttggggttgttgtgtgagaaagtgcagtgtgtatgtgtatgtgtgtgtgtgtgtgtgtgtgtgtgtgtgtgtgcagaatgggtagaaccgtgcccagaagtaggaagccctgcatatgttcaatatttagctattattttgttgttgttgtttgtttgtttgtttttttgagatggagtctctctctgtcgcccaggctggagtacagtggcacaatctcggctcactgcagcctccgcctcccgggttcaagcaattctcctgtctcagcctcccaagtagctgagattacaggcgcgcaccaccacgcccagctaatttttgtatttttaatagaggtggggtttcaccatgttggtcaggctggtcttgaactcctgacctcaggtgatccacctgcctcggcttcccaaagtgctgggattacaggcgtaagccactgtgcccagccttagctattatttttattccttcaattttttctttggggcagtctggagaacagtttcatgtgaacattctgatcacatggaaaagggaaggtttactcacgtgtcggaagaggtgtgaatggaaagtagtaaaggcatggtttctgatgttcatgtttgtggaatctgtcgtctatggcagatgcttccccgtgctaccaatttgtgtgtctgaaaggacacccgtacattcatctgcatcctcaaaatctgttcctccgtgggtttctccatctctgcaaaatgcactgctgtccactgtgtgcctaagccagccctgtttggtcaattttttgaaggctgtagggtagagtggtcaggaacaagaagccctggacccaagctgtcagggttcaaatcccagctcacctggtattgcaaatcgcatgggtgactccaggcaagcaactgaagccgtgtgtgcctcggtgtcctcatctgaaaaaggggaatgagaatcatagtatctatcttacagggatattgtaaggatgaaagattagctgttggaactgtgcctggtgcagagaaactacttcatgtgtgctttgcacacccgaaaccttcttttttatatttatttatccttggcctgggggctgtctcctctcactcagtggtgtgtctcatttgttctcctctgtgcctgagccagcacatggcacatcatattttctcagtaaatatctggcagaaaaatgtattcatcagcctggccaacatggtgaaaccccatctctactaataatacaaaaattagccaggcgtggtggcgggcacctgtaatcccaactacttgggaggctgaggaggaagaatcgcttgaacccgggaggcagagg[138 bp omitted]atagccccgccttcatcaaatgtcaccctgccccttaaaatgccgcccatgcatgttctcccacctactgcttttgtttccaatcattcctaatggcccggatctattggatcccagcatcactgcttgttagcgcagtggccttgggcaagtcactcctctggtgcagatgggggtccctaagaccaccctcagtttccatgattcactagaaggaatcacagaactgagaaaaattgttatagtcaaggctacagtttattacagcaaaaggatacagagtaaaatcagcaaaggcaagagccacacaaggcgaccccatcagtctctctgattccttaattatctaacagcagcacatagggcagaggccaagagagaccagcatgagctgccagatgtcgtctctcagtgaagtcccatggacagtgctcagttctcccagcaatgacatgtgacaacaatgatgtattgctagccagggacacttacttgggccttggtgtccagggttgttattggggtcagccatgtagacttgtgctgaatactgctgagagatcgagacagacggtaagaacggctgagagctgatgcacgccaggtgtccttccatgcgttggccaggagtgatctcattttagcccatccatgaccctgttaaatagacatctccatttttccagacaaggaaccaaggctcattgaggagaggtcacttgcctgaagtcccacggctaataggcaaatccaggagtctgatccttaaacctccacccttacagatgtggccttggacatggctgcacaccctcgcgtgagttcactcactcaggatgtattgagccattgttccagggcaggtagcattcaaagcatcaggggtgctgttatagccaaggctacagtttattacagcagaaggacacggaataaaatcagcaaagggaagagccacatagggcagaggccaggagagaccatcccgaaggggaacatccctgtgcttgtggggcttccatcttaaggagggcaagcaggcaatgggcagatcaggaaacgaagatatgacttgccaaagggtggtaagtgccatggccaaaaggaggcagagagagatggggtgtctgcttagttgggaagtcacagaagagcgggacgtgatgtttgaacagagacgataattataatggccactttcagaacacttactatttgttggataagtaataacagtaatatatgtaccaggcaatgttctaaatgcttgaatgcatctcatctttccaatcacagagatgctcttattatcatcactttacaaatgaaagggaggttagggaagttggcagaaggcacacagccaggaagcaggggctccaggatctcagcccagggatcttggcctcagaggctatgcttttcaccactgtcctgcctctcagtgcatggagaaatgaatgttcagtgcctagaagggataatcagggaatatggaggttaaggaggcaactgaggcacagagaggttaaatcgcagggttcagaagtgttgggggtgggactcaaagctaaatgatctgcctccacaatctaagctcattaccaccagaccagtcatccttaagcatgcataggagtcccctggagggcttgtcaaactagattgctggggcccgcccccagagtttcagactcagtgggtctgaggtggccccgagaaggtgcatttctgtccaggtcccaagaaccgatggtgatgctgctggtccagggcccacattttgagacccactgccctagactgcctctcagcacacggaggaatgaatagccagcttccggcggaggaaactgaggctcagagaagctaaaagtgtcatgtggaaaaaatcacatagccgttagactgtggtacctggatctcaaacccaggcaatccggctccagagtgtttttaaccatttccctgcactgcctcctgccggtcaaaagaataaatgcatatgcaggcaagaatgaatgggtggtcccatttccgtagaaggggaaaccgaggtcggggagctgggcggggagaccccagcatcctctgacctctttccttgcctccctgcccccgcccgcaggtgaagctggtgttcgtggaggaccaggctgtggtggagacggtgttcttcctgacgtcgcgcaccagggcgctgctgcggcgcttccctcgcatgctgctggtggaccggctgccggggctgcagggcgcgctggatctgctggccgtgctgtgcgtggacggctcgggccgtgcgcgccaggctgcctgctgcgtggcgcgcccgggcacaccgagcctgctgcgcttcgcgctcgcgtcgctgctgcagagcgcgccagacgtcaagggccgcgtgcgctgcctcaccgccgggcccgaggtggcggcgcagttgcctgcagtgcgccagctgctgccctgcgcgcgcgtgcagatctgccgcgcgcagggcctggagacgctcttcagcaaggcgcaggagctgggcggcgccggccgcgaggacccgggcctgtggtcgcgcctgtgccgcctggctggcgcgtcgtcgcccgcagcctacgacgaggcgctggccgagctccacgcccacggcccagccgccttcgtggactacttcgagcgcaactgggagccccgccgcgacatgtgggtccgcttccgcgccttcgaggcggccagagacctggacgcgtgtgccctggtgcgaggccaccgccggcgactgctgcgtcgtctcagcccctcgcgtggcgtggcgcagtgccttcgcgacctggtggccatgcagtgggccgacgcggccggggaggcggtgcccgaggggcccgatggcggggggccttggctggaggatgagccagggaggggagcccagggggagaacgagagggtgaggggcctggagacaggcgactggggaggggctccgaaagaaggaagtatttggaggggagcccagatggagaaggagtgggcaagggcactggaaaccagagactggggcggggctcagttcgaaggtgagaaggggagggcactgcagatcagagattggagagggggtcggttggagaatcagaagccgaggggactggaagggggtgtcttgagagggtcgaagttagagaaagggcacctgagagggccagagattagagactggagggggccccagttggagggtgagaaagattggggactggaaggttatgtctggagggggtcccagttggaggaccaggcgctaagaggattggaagggtatacctggagggtggcccagctggaagatcgcaggagtaccaccgacctgagggggacccagtttgactatgagagggtcaggagtcttgaaggaagcccctggaggggggcgcagctgcacgatgaaagggcagggggactgagaactgcagaatggaaggggccacagtcagaagtagagaaggggagggggctggaggtcagaaacttgagggggatccccttggagaagtccctggagttggcccctgagaacggagaccaaaggggaccccagtgggaagatgagaggaggagagggccagagattgcagaggagaggggagcgagggtgggggtcaaaagaagaaggggcctggaggatatagttctggtccagctgggagacacgagggtcacaggcatggagaatggagatggagggggagcccggtccgtgggccccaagagccgagccggacgagggatggagtggggagacgcaggagggcggtgtctagggctggggaatggagtcgtgtctggcaccccggtggggactgtattggaaggcagcccagaatgggcagcggcgaggagtgaacacctggctgcaggtgacggcctgcaggaaggaggcgaagatggccccagggaaccaaagaggctttgccgacccccgggagaggaggaggtggactgggaacccctggccaaattccgagcagcctgcgggccagagctggcagacctggtggctgaggagttggcctttgctaggcagcatgggacccggggtttccactggaccggagctggctttgcccttaaggacggcacctcggacttcttcctggatggggccctgacacgctgcagctgctcaattcacgccgcccgccgtctgccctgcagacacctctttgcagcgcgcctcctcactggggctgccttattccacatggacctgctcagggattgctgggggagagccccagagccctgacccttcatgcctctgcccaccaccctccaccaggagggtcggagggcattcttcgatcccaaagataatagggctgaggccaaggagaccgttgcagtccccctggccaccttctgggtcatccagggacctcctcatggcagtttgcctctctgggtccaagggcaagctgtaagtggtctctgaggtcctggagccacagcttgggaaggtgttgatgggcagggtggattctgagggcttccctctggagaggaagcatgtgatgagaggtgtagacagggtcaggctgggacagaaggaaggaaaggggcagagctggggggagggggaggaagcgatcatatggggagtgtctggcaagagtagactggccagtctagggagtgcagcggggagaggggaaagggagaaagtacagaagacagatgaaggagaggaggtaagcgagaaaaaatggaaaggggagccggaaatggaggagagaggacaagcaaagagacagaaatgaagacatgaggaaaagctgggggaagcaggagaggaagggacgggatgtaggagggggaagaaaaatcggagatgagacaaaagaaatgtgtgggagacgggtagagacgaaatgcaaggggcgtggttttggtttttctccaagacctggagacatcgacccccatcgccttctgaagagagagggagggcgggcactgggggtcaggagagtctccagcaggggaggggaattgtttggactattgttcttcaggattggaataaaacaatcttattttggtttccgtgatgagttcttggcttctggggttggttgggagtcccagatccagggaacagttgagatggtccagcgttccttcattctttctaccgacaaggcctcctggggccagatggatagaggagccacaatgaattcatctccatagcaactcaagcttcctcctccatcatctggaccagtgcgtcccagtggcaacttcttgacatgagtcgattctaccttcaaatgactgactcatgccaaatgtcctggccacagaatgggcctgtgacccagtcctggtcaacgagtctgctcaggttgaggtgggaggcttttttatttttatatttttgtagaaacagggtcttgctatgttactcaggctggtcttggactcctcggcttaagcaatcctcctgccacagcctcccaaagtgctgggattacaggtgtgagccactgtgctcagaactaggaagcttttttttttttttttttgagtcttgctctgttacccaggctggaatgcaatggcacgttcccggctcactgcaacctccacctcccaggttcaagtgattttcatacctc[134 bp omitted]cagcctcctaaagtgctgggatcacaagcgtaagccactgcgcccggcctaggaggcttctaataaagattctatcactcctaagaaggcctagagacatgatcaggcctagacctgctgatgattaccttggtatggtgtgataatgaagtccacactgaggatgacagagctgagatgaagaaaatctggatctttgcttggctcagttgagtctctcgagtctgctctaccatggggcttcttaagtaaaatatatccttttttgttagagacagtgtctcgctctggcccaggctggagtgcagtggtgcaaacatagctcactgcagccttccagctcttgggcccaagggatcctccagctcagcctcctgagtagctaggactataggctcgtgctaccacctagctaatttctttttcttttcttttcttttcttttttttaactttttgtaaagatgaggtctcttgctacgttacttgggctgttctcaaactcctggcctcaagcgatgcccctgcttcagcctcccaaagtgctagaattacagatgtgggccattgcacctggccaatcaaagataccctaatgatttagggaagtttgagttggggtttctgttgtcgcaactgatgaaggggatttaattctattataggtgacaaagtccaggttgaagtagctcagcatttttcaaactttagcgtggacgtgagtcacgtgggcaccttcttaaaatacagagtctgactcagtaggtctaagatagggcccaacattctagcaagctctccgatgatgtggctgtgctgggttgtggagcacactttgagtagcaatgaaggaacttgagataaaagacaattcaggccgggtgtggtggctcacacctgtaattccagcactttgggaggctgaggtaggtggatcacttaaggccaggagttcaagaccagcctggccagcaaggcaaaatcctgtctctactaaaaatacaaaaattagccagatgtggtggcgggtgcctgtagtcccagctacttgggaggctgaagcatgagaattgcttgaacccaagaggcgcaggttgcagtgagccaagatcgtgccactgcactccagcctgggtgacagagcgagactctgtcaaaaaaaaaaaaaaagaaaaaaaatgattcagtggttcaagtcatgcgaagtcaaaggctttgatggcagctgactgcaggggctcaaacaatgtcaggtttcccctctctcgcctgcttttcgtgcgatggatttcttcaaaagacagctctctcctgagaaagggggggactagaagttcccatatcacaccctcctatcttgatccaaaaataccattctatcagcattcgtatattaagtctcaaggaagcagcaggttggatttatggaggttatcagttatccatggctacataaatgctgtgttaacaactataaaacttcctaagtatataacaataaacatgtatttggaatcaacctaaatgcccatcaataatcataagctagataaagaaaatatggtacatatacaccatggaatactatagagccattaaacaactagatcatgttctttgcagggacatggatggagctggaggtcattatccttaatgaactaacacaggaacagaaaaccaaatactgcatgctctcacttataagtgggagctaaatgatgagaagaaatgacacagagagaggggcaacacacatggagacctactagggggtggaggatgggaggagggagaggatcgggaaaaataactaatgggtactaggcttaatacctgggtgacaaaataatctgtacaacaaacccccatgataaaagtttacctatacaacaaacctgcacatgtacccctgactttaaaagttaaaacaataataaaaatgaacacgtattgcttatgagtcttgggtcacctgaggggttggctagacccttgcttttcagtgtggtgcatgcaacagtgtcatgaacattccctaggagcttgttagaaatgcagattctcggctgggcacggtggctcacacctgtaatcccagcactttgggaggctgaggtgggcggatcacctgaggtcaggagatcgagaccatgctggccaacatggtgaaaccctgcctctactaaaaatacaaaaattagctgggcgtggtggcgcacctgtagtcccagctactcgggaggctgaggcaggagaatctcttgaacccaggaggcggaggttgcagtgagccgagatcgctccactgcactccagcctgtgcgacaaagtaaaactccatctcaagaaaaagaaagaaagaaaaaagaaagaaatgcagattctcaaacccattccaaaactacagaatcagaatctcattctaacaagatcctagtatgcatgttatactttgaaaagcaaagcaactgatcataaacctacaattatcggaaataggcttatttaaaaaaaatgaaagcagctaatcttgataaagtagctgatcttcgttgggcttgcccacatatcgggagtcatctggcttttgggtgaactaaaaaggccttggcagggcttggtggctcatgtctgaaatcccagcactttggggggccaaagtgggaggaccgcttgagcccaggagttcaagacgaacctgggcaacataggaagaccccgtttctacaaaaatagaaacaaaattagcctggtatgatggtgcacgtctgtgatctcagctactcaagaggctaaggtgggaggatctcctgagcctgggaggtcgaagctgcagtgagccatgattgttccactgcactccagcctgggtgacagagtgagactctgtctcaaaaaatgccttggccgggaggactagggtaactcgttcagcacgtagacccctccagtacaaccctatgaaacttccctgcagcccctgcctttgcagacagctcttcgtctgctgtgctgcccattgctttcttgcaatgtactatctgtctaataaatctgcctttctttccctacgactgtcttgataaatgcctttacctcccatgatactggccccagctagtcacacccgtgatgcccatctcttttttttttttgagatggagtctcgctctgtcgcccaggctggaatgcagcagcacgatctcggctctctgcaagctctgcctcccgggttcacgccattctcctgcctcagcctcccgagtagctgggactacaggtggccggcacc[184 bp omitted]aaagagagaaaggaaaggaggcaggagggatcctgggaaggcaaacaacagctattgagcgcaaaccaaatccaaaacttctccacttgcctgttttatcattagattcttagatgtgggctatctggttagtgacgggaagctgaattaattcattaattgattcaccaaataacacacagaaccctggggtggaaaagagctcagcccataaggtaaagagaagatgggccagtgtagatgggtcagagtgtgaaagagggagagatttggacagtgaaatccgcaagcccttaaagatagaagatgaggtgagtctttatcctgggaggtatgggaagccttcaaaaggttttaaacagagagtggcttgattggatgtacattagaataaccacctcccctaccccagaagctttactgtgacaaatggattggatgagtccagaccaggaagagacgtatgtgaccataaacaaacaaataaaaataaattttaaaaaacaggcagaaggatcttcacagaactggaccttgaagaatgtgtttgccaggaaaagagaatgaagaagtacgttcctattggagggaactgcacgtattacagtatttggcccttcaggaaggcaagaggaaactaaaggttagtaaaccttaaccctctatatgccccacatatatagctcacagtgttaaatcaagtttagcctaaagctgcctccttacatattttaagttcggcctgaaggtttttctgtacgtcgtgaactataacaagtggaggtgtaaacagaaggtggcctacgcttgtgccaatcaccgagttttgggcaatcaaatgtagccaactgttcgaactgtgtacagcaaacgccgagctgtaatcaatccagctgtttctgtacctcacttacgttttctgtatgtcactttcctttttctgtccataaatcttccaccacatggctgtgctggagtttcagcctactctggcccgaggctacctgattcgtggatccttcattgctcaattaaactctatttatttatttatttagagatggagtctcgctctgttgcacaggctggagcacagtggtgcgatctcagctcactacaacctccaccttctgcgttcaagcaattcttgtgcctcagcctcccgagtagctgggactacaggtgcccaccaccatgcctagctaatttttgtatttgtagtagagacagggttttg[132 bp omitted]aagtttttcttttatcacaagtcacatcaatccctcgggcccctgctcaaatgccacctcttcctgaaagccatccctaagtagtctctctaaagagccatccctgcccctttctttgctttatccttcacagcacttatcactacctgaaattatgccacacagctatttaccactttggcattgtgattaagcttatcaagtatgaagccagactgcctgggttcaaatcccagctccactacttccttgtcatgtgaccttccagcctatgttacagttgaggggtcataatagtacctgtctatagggctttgtgaggatgaatgaattagtgtgtgtaccagtgttctaacatcgcctgcatttccatttttcccaaagcagcccagttacttattaacatactgctttttccagtgacacgtgttcacagttattaagtcgatctcccgccaaaatagaagctctattttgttttccattgtatccccagtgcctagaacagtgcctgttgcaaagtaagctttgagttaaaaaaaaagatgaaagaatgaaaatggcagactgcctagcagaactagcccttcccgatgtttcattgttgctatagtgacgatccagtctgcacgaagatcccagcttccttaaccttgttcctacctccagccagctcacccattggccacctgtatctcctgctgtagcagccagaaagctacaactcccagccggctgagcgccaccagcgctttcgcgtccaagtccctttgctgagtgtgagggcctgcgcagtagaacccgcgggcccagagctccatctgagcatgtgcaggctgcggggtgtttccttcgtctgctggcgggagaggagtggggaggagctctttacccgctgagcattgtggggcccgcttggatctccttgtccaaagggtctgggcgccggggctgcagtctctgggtgaggaggcggacgcgggaaacctgcttcggtctccatggttacgagccgctcagcgcgcaggagggggattcaaaggttggcgttgccacagtaaccctggagtggaaggagacggggattagagacctcgcgggagaaattagactaacagcctgggaactggagggatggagggtgtgccggaggaatcagtctgcagtaaggggagttggggtgatattaggggaaatgggatgttttcaaggacagggagtgttttggtgaattcctatgtaataaggagatttggggagatcattgaaatcgacaagttactagatacttgggatgctcaaggggaagtggaaacgcagtaggatccgcccgcctcagcctcccaaagcagtagggaaaattggggtattaagctcttttgccattctgcagttattatagagctcctgctggaagccaggcacagttgacagtactggtaaacaggacagatgtgactatagacggaattggggtttcatggagaaggggaggtataagaaaaggggactgttgtcctctatgggagggactgggaggcgattgggaagaactggcgctgtaaagagaagctggaagttttataagggaattgaggtattatataagttaattctgttgttatttatagaaggccaactcagtagcagcctctaggaagcactgaggattcctcagtatgcaaaggcatttagtgatagagttaccagatttagggggaaagcaatggccagttaaattctaatttcggaaaatgcataatattgtagttactctctgttgtttatctgaaattcaaatttagctgggcatcctgtattttatttggcagctctcattatggttaatttaagtgtttgtgaagagtgggttattataggggaaacaggtattatagagtaattgggttgtaggaggagctggggatagtcaggaaaagtcggagtgttgaagctaacgccaagatcagcactgactgtgtgccagagactatgctaagtactcttatttttaaaaacgttttattatggaaagtttcggccatatacaattgtttgcttgtttttgagatggagtcttacgctgtcgcccaggctggagtgcagtggcatgatctctgctcatttcaacctctgcttcccgggttcaagcgattctcctgcctcagcctcccgagtagctgggattacaggtgcgcaccaccacgcccggctaatttttgtaattttagtagagaaggggtttcaccatgttggccaggctggtcttgaactcctgacctcaagagattcacccacctcagtctcccaaagtgctgggattataggcgtgagccactgcgcctggcccatatacaattgttaaacagataatatataataaagctacttgtacccatctctgctttacatgagtgctgttgaggcatcccaacattcctatgaggtagcgttactgtcacacccccattttacagatgaggaaactgcaccacagagaggttaaataacttggccagaggtgttagaaccagaatttggacccacacaatcgggccccagagtctgggctctcagctgccatatcacatgtaacctccgtctgggaaatgtgagtagggagtgaggcatgatgggagcaacaagagagtagtagtaaggtataaaaggaaaggtagggaattgggccgtttgagcattgtgcagttgttataggatttttatttttattttttgagacagagtctcactctgtcacccaggctggagtgcagtggtgcaattttggctcactgcaacctccaccttctgagttcaagcaattctcctgcctcagcctcccaagtagctgggattacgggtgtgcgccaccatgcctggctaatttttgtattttcagtagagacgaggtttcaccacgttggccaggctggtctcgaactcctaacctcaagtgatccacccgcctcagcctcccagagtgctgggattacagccgtgagccatcgcccccagccagttgttctaggatttttataagatgttttgggagactgggggagttacagaagagtttggtgttttgaaacattatgggaagttgtatagttgcatttcaatagaacagtagcagctagccacatgtgggtgcattacattaattataatgaaataaaactcagcacatttcaggaagcgcctaccgtattggatagtgaagatctagagcagtcccaatgagtctggataacagggatttagggtaaccaagggttaaggcacaagcaggtgcagccagttctaggcaagattgggcagcatccaggccacatcctcactcctgtgataacaagacagaagtctccacttcagcctcttgattggtcacgggccaatccttcatagggtgtaaccaactggaggcctctaaagggcacctaggggtgttaccaaattcttttagcttaatgaaaactctaaagagcactgcagtcaggggctcttgagctacttgctcaagcccactccgactctggagtgtactttcacttccataaatctgtgctttcgttactccgctcttttgttgctttgtttgtgcattttgttcaattctttgttccacacaccaagaaccctaacaactcacagtcaggaccttccatagggtaacaccatcactgcagaaagttctgttggacagccctgatgtgtggggtgacaagtgtggaggctttcctggctcctaaagttcgaccttatctcttagcgattgctctcgtacttcctctgactcacccctaaccttctcctctctgttctactaaaaatacaaaaattagctgggcgtggtggtgggcacctgtaatcccagctactcaggaggctgaggcaggagaatcacttgaacccgggaggcggaggttgcagtgggccgagatcacgccactgcactccaacctgggcgacagagagactctgtctcaaaaaaaaaaaaagaaaagaaaagaaaaaaaaaaccatgctgaattggccaaatatttatctaggacttcccagcctgagaactgtaagaaataaaattttactctttaagccactgagtccatggtattttgttatggcaacctgagcaggataaggtagtatacatacctttaacttcactgtgtaacttcagattaatttccaaaatcaagcattacctaaccaacagcagaacttacatttgtgctccatatactcaccagtagtaggcattactgacttcttaataaatggaagtttgatgaatataaaatgtagtatttttatggcttttaatgaggtttctgataactagacgtatgaaattctacttttgttcattgtccattgcgatttacaaactgtaacattttactcataacgtttgcccatttttcacaaggagttttctgtttgtttactcatgttgaatcatttttatgtattataaatatcacctgatatttacatcttcttcttagtagcttcattctaatgaacttcttcttttttattgttgtttttctgtttttttttttttttttttgagacagaatgagactctgtcagccaggctggagtgcagtggtgtgatcttggctcactgcaacccctgcctcccaggctcaagtgattctcatgccttagcctcccgagcagctgggattacagacatgcaccaccatgcccggctaatttttgtaattttagtagagacggggtttcaccatgttggccaggctggtctcgagctcctggcctcatctgattcacccacctcggcctcccaaagtgttgggattacaggcgtgagccactgcatccggccttctatttttaatttagcatcctcaaataaatcaatttaacttctaaaaatgtgtgcctttttgttttaataacattaacctatttttttatttttgtaaatttatgaagtacattcttcaaatgtaacaatttagttctacttcaagataaggtatagacaactgcaaaattccactgtccttacgatcacaatcatgaagaggatggagctgcagaatctgagcatataaagacttttatgaattctaacgcccaaccccaacttgagcattcattgcgctggtcctaattcacattcaaacgccctgagaatggagctaacaggatacactgcacccaatctcataggcacacacaggatagatccgaataccactgcaaagacttttaaaatgagctgatattaagacctcagttcacagaaagccaaataaataataaacatcttctgttggatacaaataaaacagagtctcataagataacattcacatttcgagggtacatatcggaactactgagaatacaaggatgagctgcaaaaatctccacttgtctggcaaatgacaactcagtggacaccaaacactgaataacatgtacagtgaaattatctgacaaagactttaaaagagacattataaaaatactcaaatgaggccaggcacggtggctcatgcctgtaatcccagcactttggaaggccgaggcgggtggatcatgaggtcaggagatcaagaccatcctggccaaaatggtgaaaccctgtctctactaaaaatatttttaaaaaaaaattagccgggcgtgttggcatgcacctgtagtcctagctactcaggaggctgaggcaagagaatcgcttgagcccgggagacagaggctgcagtgagctgagatcacaccactgcactccagcctagatgacagagcgagactccatctcaaaaaaaaaaaaaaaaaaaaaaaaatactcaaatgtgccaggtgtagtggcctgtaatcccagcactttgggaggctgaggtgggtggatcacttgaggccaggagttcaaaaccagcctggccaacatagcaaaactctgtctctactaaaaatacaaaaaattagctgggctgtggtggtgcatgcctgtaatcccagctactctggaggctgaggcacaataatcgcttgaaccaggaggcagaggttgcagtgagctgagatcgcaccactgcactccagcctgggtaacagagttgagaccctgtcttgaaaaaaaaaaagctcaaacaagcaaatgctgacacatttgcaggaaaatagaatataaggcaagaaatttaaaatatagagaacaaaatggaaattttagaactgatacatacagtgaccaaaatttaaaaggtggtgaatgcactcagtgggacgacacagataacaacaggtgaacactccagcaaatttgaaaatagacaaattaaaattacccaatcagaataatggaaaaaatgaaaagatgttctaaataagtagaatatcagggacatttaggaaaacataaaagtctaacatttccacaataagagtctcagaagaggaggaaaaaaacaaaatataatattgattgattcaacataaatactatggtttatttctagatggcaaggaaaatcacatgtaagaggtttccatttaaaagaattccactattcatcaaaattttcatctattctcaagactgttgatttcaaactaggtttagagtagcaaagcatatgaattttacagtagaagacatgagaaggatataaaagtttgttttctgtattctttcaaaattcttattttgaaggccttctgggcatataagctattggaacttgtcatcacttaaactatttcctataaagatgaaaatcaggctaataaaaagtatttttagaaattaggctgaaaacctctaagtttggtaaaagacataaaactgcaaatttatgaattggagcaaattccaaagggaataaaacaaggaaactcatccccaacataatgaaatggctaaaaactaaagataaataccttgaaatctgacagaaaaatgacacactacatacagggaaacaacaatttgaatgactgcagatttctcatcaggaaatacggaagctaaaaggaaactgctgaacagaaaacaatgtcaactaaaaatactacaagcaaaaaacatcactgagaatgaaggtgagaaaaagatgtcctcagaggaagcaaaaaataagagaatctgtacctatcagaaccactctaaaagaactaaaaaacgtctatcagaggaagtggaaatttgcagaacgaaatttggaaaataatgaaggaagagcaacagaaatggtaaatatctggaaaaacataacagattactcttctcatgagttttttaaatcttctgagtgattaaaagtagaaaatatataataatttattgatgggttttaagatacagaaagattatgtagaagataactatatcctagatgagaaaaggtaataggatctaaatggtgataaagtgcctagattccactttaagtggtacaaatgtgataacagtagaatagaaaagacataacaaactggctgactgaggataaatcctaacatattaataattacattaacgtaagtaattgaaatcttccagttaaaagagactatcagaatgggttcaaaatacaccataaaaaaaactgactcaaccagatggtgtctactaggaacttgttttaaacagattaaacataaaaggatggaaatatgtgtgccacgaaaacattaatcaaaagacagctgaaatggctacaaaatgacagagtctatggtagaatccaaatgtcagagttggcttattttttgtatggtacattgccaggaatgtctgtctcagaataagctgaattaccctcattttctttttggtggttctgtggagttgatttaccacatttcatctcagtattccttggagttgaccatgaacatttaacccaacaactccttgtagcaggctacacaccagtgggaaaatattttctgctcatgtttgcattttctcccatttttgtgctctctttcagcaaatacatttacattgttctaataacagtagccatagataaagtgttaaagtcctaacatacaaaaaaaaaaaagactgtcatcatgtatgccttgagtgtcctcagctgagaagcttttgttagcttttctgcttttagttatgagaaggtgatacttcaaacggagtgtccataggaattatttttcacattaatcaggaaaagttgcctttccaggccccatccttcataaacacacctatccggatgtcctttatcctgggtcttcaagaatcatgtcaatggataaaatagtgatatatcaagcaatggttggaaaaaatttaaaaggaatattactaccttcttcagacattcttgaggaaaatgcatgaggatacagtcaataggtacatgccaggttacaagtctgtcctgaaagcctgtgtgatagatgttacccagtcttcttctgtcttgaacactgaaatcaatgatcacatttctgtttatccatttccaatgagaacgctggattctctcttccagactacctaactgactcattttacaaattctgctgtctaagataggacacgaggtaagggtccctttcactaatgcttctgaagagcacgtccagggccaggtcccctttcttctccaccatgctcagcaaggcctcattcttgctctgccgtgtcttttcctgctccaccagctccttctcattctcagtaagaacctcattgtcttggagatcatcgagcacccctttcaggtcccccatcctggcttggagttgccggtggttctccttcacaaaggctgcacctggatgaaagggggagtttcagactttgagaatcgttcacttacaggattcaggatctataccaagcttagagtcaaaattcaggggtgggagattgctccttgtgtctgtagcttaatttgtggacatacaaaatcacacacattcacagagcaaatataccctttgcagtatcaaatgcattgaggtgtctcaaataatgtatcttcctcagtcctactcctctcatccatttcttgaagcctgtttcttcctagttggtgtttttcattgaaatcctagacagagctctatcttgctgtacatacatttatatataaatccctctaacaacgaaacacaaatcttctagttcatacattgtcagaaactgtgcatgatgctagaggtatggagaaggattcagctggatccccaaagcttagctggcagagctatgaaagaagagatttaactggagacatacaatgcatagaaaaggaagaacaggggaaaagatacagacttttttccatcatgtagactcagggtttacgttgtgccccatataatgtctgtataaacttggccaaatcatattacttccatatcacgtggtttagaatgcatggaggttgaggtgtgattttgactcaagacatgttctggaccagcttcctgtagactgagctactaagctttgatttcaacgtgcaggcaacaggtgctatattttgctccacatcctaaacattatatttaggaagggtagaagccttttgttggtgctgctcagcctgcagtcaccacctacagagatgttctttgatttattttaggacgtcacctttatctgattcttaaccaagctccttagctgatcctcattgcacctccagatgtgaggcatgatttctttttatttaatctgcctcaatggccttccaggcaacaacagctaggaaatggcatgattgccatctcagaaggtgctctcttttttctcccagtggtctgttttgagacatgagttcggaaacttacactgtgtggagcctgacaatgaagccaacaatatggaaggcgggacgaagacatggagaaacattcctcccttgtgatgttgtttgagcccatgaatcagcctccctggagtcagtcccacatctcttccttgaactcgcctgagccatgacactcttgataatttcactccatttaagttggactttctgtcatttgccacacaagactttacacagatccagaggacattgcagattgctgccttgggtgatttttaaaattaacgtggacatgaagtcatcaggagacaaggagttccaaacctggatttattgcttactagatgatggaaacttggtcctctcagtgttaactctattttatttatttacttatttatttatttattttgagacaaagtctcactcttgtccccaggctggagtgcgatggcacgatctcggcttactgcaatctccgcccctgggttcaagcgattctcctgcctcagccccccgagtagctgggatcacaggcatgtgccaccacgcccagctagtttttgtatttttagtagaggcagggtttcaccatgttggccaggctggtctcaaactcctgacctcaggtgatccacctgcctcggcctcccaaagtgttgggattacaagtgtgagccactgcacccagccaactctttatattaaataatgtaaataattttttctctgctatatactaattccagtgtccttaacagatccttggctgatatctgctcttcacttttacaacagccccaccgttccccacttcctattcattcccaacccacactcaatcatccacgctgttttgaagagccaacacattgttatccatcctttaatagttactcttgcctttccgtctaaagtccaaaatatttcaacttttattcttggactttcaactgccagctcttgactatccttctcatgtcacctttactctgtccctctaacagtttaattcacagccatatcaaactactttaacttagagttccccagacgcaagatattaaatatttacccccaataatttgctgttgtatgctcttttgtgtctacatgatgtcctcacgcccttctgggactaaatcatactcattgtctgtatttatgacatcagtcattcttggcagatgacaaggatggaaggaatggagccttgctgagagatgctgttacagcaggcagctcgtcagatatgagcagggcaggagaggactcctcaccccaccagaaatgtcaggcaaccatcaggtgatggtcaggcagttgttacaccgtctctctaaaataataattggttgcagccggcaccagggaaaggccgtctcctgacagagagaaaacacctgaaactggtgatcagcagcttcccaataagatctcgggaactgggccagtgggctcaagaatgtgcattaagagcagagtttaactggcctataacctcttacggaggttgagctggtaagggaagaatgcctcaagtgagcatgcgtatgactccaagaaacacactgcgcatgctccccttccaagcccctgcgggccactatgcaggcgaccagcccaccccaggggaagaatcagggaagaagggatgcaagaccccggaagtgtgccaacatattaaaccccaagtcaaaaggtcaaaccgtgcacttgtctttcaagtcaccccctcggccgtcttccaagtgtactttcctccttcctttcattcctgctataaagcttttttttttttttttttttttttttttttttttgtagaccgagagtcttgctctgtcgcccaggctggagtgcagtggtgcgatctcagctcactgcaacctctgcctcccgggttcaagccattctcctgcctcagcctcccgagtagctgggaccacaggtgcccaccaccacgcccggctaattttttgtatttaagtagagatggggatttcactgtgttgcccaggctggtctcgaactcctgagctcaagcaatccacctgcctcggcctcccagagtgctaggattacaggcgtgagccactgcgcctggcctcttgctgtaaagctttttaataaactttctctcctgctctaaaacttgcctcggtctctccttctgccttatgcccctcagtcaaattctgtcttctaaggaggcaagaattgaggttgctgcagacctatacggatttgctgccagtaacgttctggtgccatgtcacttggataccttccactgtcactcaaagaccccttgatgtctcatacatacccttggctttaatgtaaacatttcacttacctgagaaaggaggaggggctgatgcagctacaagctggagatccactacaaaagagggaaaaattatatgatgagatgagataaatcatgtacccttatttagcttttctagtctttgatgcaaccaactgaaataatttaattctacatatgtcataaggctcttgttttgcacactaatacactgaggaaaccccattaagttgtgggtcactcactgacaattcagaaaaggcatcggaggaagaaacacatttttccaatttctttcaacttgcaggccaatatcttaggaactatggggctacaaaaacatatcatacagtgctacataaattacagtcaaagtgttttagacatgaaataacaacattacatgagttaattaaaacacgtgttttttggatgtgattgtaccaagactgttgatggtgcagaaatttgggtacccttataagttgatagaagatttgctaattggagctaccattttggaaaataattaaaaaaatttcccatgatgccttcaatgtggttttgcactttcatctagactccttgatgttttcaaagttcagatgaattttgcaacatgccccccccaccccacctttggcagcagctcagtcaccatgtcaccaagacagaataaatatgagcttcccatctcctgtgaggtctcacaattgagtttctggtcatttgacttctgggcagaacatgagctgccttgaaccagcatactcatccaagacccagccatccacaatctcccccatttcatctagaatttgctatcaaaaaaaaaaaagcatgattgtgacacctggaaaaaatcttttttaaataaaaaagtaaacaatgtaaaaatattctgatgtttacagagaaatggagagtgtggtggcatttgcttactcaaaatatgtattgcatgttggctgtgaactagattgcattctagccactgataatgcaggcaatggggaatccgacatctgcacggcttcttcgcatattaaacatcacaaggagagctaagaagttgcacaaacaaaactctgacaatctgagatgctaagacattttaccgactggagggaggaggcggggagggtgcatgtggaggtgcactcatgagatgctactcatgtggagatgaggcctgggtcggctgagcatcatccaaccctgcaatgtgcctggaaactccaagtgcagtcccagctcatgtgcaccgcctcaacaagagggcagtttgcccagagaaggggaggcacagccatgaagctgatcttgaactctagacaccattgcagggaaaggaaggtgatgggattgtgaggattcagtggaggaaggaagatcagtgactgaggaccacaaagagcagacagtctacaccagtggtccccaacctttttggcacctgggaccggtttagtggaagacaattttttccacggactggagagggaggggatggtctcaggatgattcaagtgcaatacatttattgtgcacctaagttctattattacattgtaatgtataatgaaataactatacaaacaactcaccataatgtagaatcagtgggagccctgagcttgttttcctgcaactaggtggtcccatctcggggtgatgggagacagtgacagatcatcaggtgttagattctcctaaggagcatgcaccctagatccctcgcctgcacagttcacaatagggttcgcgctcctacgagaatgtaatgccaccactgatccgacaggaggcagagcgcaggcggtaatgcaagcaatggggagcagctgtaaacacagatgaagcttcgcctgctcaccgtccactcacctcctctgtgcaacccggtttctaacgggccacagaccggtaccagtccctagcccgggggttggggactcctggtctacacagtcaacactgtgacaatattgccccaaactactaaaatacaacagcagcaacaggcaaaactcagttgaaattgttgaaaaccattccacaacatgtactcacacatttgttcaactatgtccttcttcctgggcattcagtttggtttcatttttttcccaccacagacaatgcctcaaataatatcactgcatacaacttatcttcatatgggtgcttttatgttatagtatggaattctaaaagtgactttttgttcaagagacttgttttaaaattaatctgtgcccatacaactacataaaaggttaaagcgatttatagctcctatgcaaatgttaatatccttcccttcatagagcttcattgaaatttttcatgctgtgttacccaagacaaggatctgctactattgaagatactgatttctgcatcattgtagttattcaaacagagcatggcattttacaaatgtattggagatataaatgtatctccagagattcaaggaactatcaggagatctttggcaaattgtctgggagtttctaaactttaaaaaattgtgtttatgatgttgagcttctgtgaatggataaaacattttccagaactttttaacagattacctcagggaatatgacaccccgaaaatgaaaagcatgagtatggaagaaatgattaaattgtgaagaaagtggaactaaatagtccttatgtttcttctgactcttagaatcttctgttctttaccccctaggttcgagggtttccacccctctcccaggccccttgagcatttcacttcctagagatgaacaaatgccaccattgttgtgttatcacactgataatacactgacaatagatttctcttttttttttcttttttggcaagaacattttattttattcaaactattttttttaatttaatttaagttctgggatacatgtggaggacatgcaggtttgttacaaaggtaaacatgtgccatggtggtttgctgcacctatcaaatcatcacctagatattaagccctgcacgcattagctatttatcttcttctttttttttttttttttttttcagatggagtttcgctcttattgcccaggctggactgctgtggcacaatcttggctcactgcaaccccctcctgggttcaggtgattctcctgcctcagcctcccacgtagccaggactacaggcatgtaccaccacacctggctaattttgtatgtttagtagagacagggtttcaccatgttgagcaggctggtctcgaactcccgaccttaggtgatcctcccccctcggcctcccaaagttctgggtttacaggcatgaggcaccgtatctggccttttagctatttatctagatgttctcccttcccacatcacccaaaaggccccagtgtgtgttgttcccctccctgtgtccatgtgttttaacactgacaatagatttcttttcttctctgggaaagaaccataaacaagatttcttctttgaaatccaaggatagaggtacatgatggatccctgtctaaaaatgccagcctcgcccactcacctacctggcttcacctcagtatcccacaccaaagtcccatgtcttttttcagtaatctcaagttgaatgggttccttcatctgcccagcatagaattttgagaagtgctgaatttctccagggctcctgtaggacaatttcaactcctagaggaaacacatcagttgacttgaagcagtggagggtggaaaggcccggctccctacagtgaactggccaatggaacttaacccgtttcctgtgcaatgtcatggctggttgagtgggaaacagagggagagaggtaaacagctctttacatttacaatgttaggaaatgcttttataccaggaagggaagaataacctagctgtcaacaccacatgagtcagagaaaaactatctgagctaccaactgaatacaaacgtcttagattttgagggttttgaggcccctcattaatgatgcgaccagctcagaatccgagattctatagagaagcaagaaagcttccaaagcagccccatcaggtctctctgagcctcgctgggaagccggggtcagataagccatttcaggtccctctctgttttgcacccagtctccccaggattcctaaaaaaagctgccctggggagcaagaaagccccttatgcaggacagaattaggaaaagcttagctcatgcaaatctctagtttcttcagaaaacaagccccccgacccagctcttggaaaatagggatttaaaaaattacaaagggtgagattgttggctggaatctttttaaatggaagatgactctgaggagagtttacctcgctcaagatcatcacctctagggcgggcgcggtgactcacacctgtagtcccagcactttgggagactgaggtgaccgattgcttgaggtcaggagctcaagaccagcctggccaatatgttgaaacccccatctctactaaaaatacaacaattagccaggcgtggtggcaggtgcctgtagtcccagctactcaggaggctgagg[131 bp omitted]tcttatctcacatttactatgttgtatcattctggatgaaataccctgcattttatttatttatttctatatcagcaatgtttatggaaggttctgcaacagccaagaatgtatcttgcctgaaggacaaccaaacttctggggaaggcagtccctgcttcatattaattgctgtggagtttatcaaggaaactgggaactaaaatcagagcaaggttgggcactttattaaattcttatgctctagtatacttagaaaaagatcactgaactgatgtctgcaataagcttcacatcttgttgtctatatggctggaaaaatcatttttcctattttagccttagtgtccaaaaaggagacatgtaaatactgacacctaaccctcttgtttctcacctcttccaaggtccgcaaacaggaaaaagccatctacgccaaaacaataacattggtccgtcccattctgaattaaagaccttgaaatcactgggatgtgttttcccattaaaactggaaaacaattaaatcttgatactttgttctagagatggtatattgtgctggacaacctcatctttattttagagaacatatgctgtgagacatctttgaaaatctatttggggccaggtgtggtggctcgagcctgtaatctcagcactttgggaggccaaggtgggcagatcacgaggtcaggagttcgagaccagcctggccaacatggtgaaaccccgtctctactaaaaataaaaaatcagccgggagtggtggtgcatgcctgtaatcccagttactcaggaggctgaggcaggagaatcacttgaacctgggaggcggcggttgtagtgggccaagaccacaccactgcactccagcttgggcaacagagcgagactccatcaaaaaagaaggaaagaaagagagaaagagggaaagaaaggaaaggaaaggaaggaaggaaggaaggaaggaaggaaggaaggaaggaaagaaagaaagaaaaagaaagaaagaaagagagaaagagggaaaaaagaaagaggaaggaaggaaggaaggaaatctatttggaaatatactagctttaagttggttaatactctttgaatcagtaatttcatttaggacactctagccctgcaggaaaaatgtaaaaccatatgaatggaaagacttcttgccagggcacttcttgggagaaattacatgcgactaaatgttgaataatcatgaaataatgaaaaaagctctagggatttcgctacatggcatatcatgtcccagtaaatctgtatgtaggaataatttaaattgcacagaattatatagtaatctccatttaaaaatatataaaatgaaatatataacataaaatcagctcttccttcaactaccttaacaaatacatattaagtgcgttagttaggcaagacatcaggactgaagataattataacagggaaatggaaatttcagtttgggaaactcaatgtgtagttttaacctaacataagtatgtcaaatactaaaatgttacctctgccttagggtcttggaaatatgcaatatgattaatactatttttctataatttcaatttttttaaagggcatatttgtgattaataaaagaaaaatgttgcattttgctaagattcttccatttgtttcagaaatataaaacactctgaaacctgctgagttgggtttgaattctactaaccttgggcattactttcaggttagcagaattagacacaatataactggaaccaaagttcaggggttccattgggggcgaagtctgcaggcgcacaccatggaagcgatcttcctcatcatctatcgcctaaggaagaaggggcagaaacattagagagcacaaaaaatagtaaagcaagtagtggcataaaaagttatttatatggtatattaagtagcacgtaggctatgattcaattgatataaagattaaggtattcaactgatataaagattgtgataggtagatacacagatatgaatgaatatgtctctatgcacaaagagacatattgatgaaattttactgaaagatatctcagggccaaaggatttcttgtgaatgtgaacttataaattcttgtatagtttgcttttatttttacactgtggaaagattggctgcgtacttatgaaagcacaggacagaaggacttctttttggtgcctcagcagagaactggtagctcagctgtgtctgtgaacacgtctatgatggacaagggtagagatgttacttctctccgtcacagggctgctgtgagatgctcaatcacctgaccaccagcgagcagaaacagtcacctctgcgaggcccagcagccacagcagaaagcgagacctcaaaactatctctaagcagccaggcacggtggttcacacctgtaatcctagcgctttgggaggccgaggtgggcagatcacaaggtcaggagtttgagaccagcgtggccagcatggcgaaaccccgtctctactaaaaatataaaaattagccgggcgtggtggcgggcgcctgtaatcccagctactctggaggctgaggcaggagaatcac[134 bp omitted]attcaaacaaaacctttctacctttgggaagtctcaggtacaactcaatagagactttgtagaattaatgagcaaggaatttatgctaaaaacaatgactgtcagtgatattattagtccagctgatcgactcccttgcaggataatgaccaagagggacacaaggggactttggggaagctggtgatgtcttgttgcctgttctaggtgctgcatatgtgagtgtgtcaactatgaaaattatgaagcaat[133 bp omitted]gaaaccccatgtctactaaaaatacaaaaattagctgggcgtggtggtgagtgcctataataccagctactcgggaggctgaggcaggagaatcgcatgaacctgggaggcagagtttgcagtgagtcgggatcgcaccactgtactccagcctgagcgacagagcaagactctgtctcaaaaaaaaaaaaagaaataaagaaatgtcagcagatctctatgaagaaaaggatggcccatggagaaaacctgaattgggcctgggaaatcaaataaaagaaaaatttcatattgtattgagcaaagagatgaaactatgatgggggtaaggcagagaagggatgtggagaactatccaggaggcatcacatatatgtttagaaaaagaaccagtttccgaagggtcaaaagaaactgatgggggaaagaaataacatatcataccatctctgatgaacaattcttttacatgaacagatatgtttaaattaaattatagtaataacagattagaactaaatcaccaaataaatccatatcacattgctagggttatgattacggacagatttctgtaggtgttgagagacataccactggattaattttcttaaccttctttatttgttatagttcttatcatatgcacatatatttttcctatagcattccatgtaatatctttggttgtcatgtttttgcctcttttgttcactgatgtatcctcagcctctaaaatagtgtctggaatatataaggcacacaacaaatatttattggatgaataaatgggtttccctggaacagtactgttgaatagaaatgtactgcaacccccaaatgcaatttttttttgagatggagtctcgctctgtcacccaggctggagtatagtggtgtgatctcagctcactgcaacctctgcctcccaggttcaagcgattctcctgcctcagcctcctgagtagctgggattacaggcgcatgccagcacgcccggctaatttttgtatttttagtagagacggagttt[136 bp omitted]agagaggcagatgaaatggcttttagtaatgtatttcatttaactcacaatatcatttaggcatgtaaccaacacaaaaaataattgctatttatgtgcttcccttcatattgtcttccaaatctgtgtatgtgtattaatatgtgtattaaaacttaaatacttaagttttagagtacatctcaactcacatactcaatagccacatgctattgccggccattcaagcctatagctggccagtggttatagagttgaactgtgctgctcttgaaatagggcagggaagttctcagtgcaacaatagatatttagagtttgattatggtttgaagtgaagaagaggtttctcctctcttcttcccttatcctaccctgaatagggaagaagcagacagaccacttttcattcaatgggtcaacaaaatttcaagag[136 bp omitted]acctcagcctcccgagtagctgggactacaggcacctgccaccgtgcccggctaattgtttgtattgttagtagagacggggtttcaccgtgttagccaggatggtctcgatctcctgccctcgtgatccgcccacctcggcctcccaaagtcctgggattacaggtgtgagccaccgcacccggccctccttgtgcttttaactaatttatgattaaacagaaatggtcctgcccatgatatagagtacacaatttacagagaagcagatcataaataaatagacatgtgaccacaacagagggaaagaagagggtacagtgatcaagaacaatgggagaactggagggcacggtggctcacacctgtaatctcagcactttgggaggctgaggtgggcagatcatttgaggtcaggagtttgagaccagcctggccaacatggtgaaaccccatttctactaaaaatacaagaattagtggggtgtggtggcgcatgcctgtagtctcagctactcgggacgctgaggcaggagaatcgcttgaacccggtaggcagaggttgcagtgagctgcgactgtggcactgcactccagcctgggcgacagggcaagaccccttctcaaaaataaataaataaagggagggatggaccagactagagggcctactaaaggctttcggaagcagaaatctttaggcaaagactagaaagagactagaaagatgagcaggagccagtcttgcaagggaaacacaaagggtaagagcccagaagcaggaattcttggagtatttgagggatgaaaattcaggacagaagtgctggaacataatgagtgagaagagagtgataggagatggataactgagatgttctagggtcacaagaagtcatggcttcagctgggcacagtggctcacacctgtaatctcagcactttgggaggctgaggcgggtggatcacctgaggtcaggagttcaagaccagcctgaccaatatggtgaaaccgtgtctctactaaaaatacgaaaattagccgggcatggtggcgtgcgcctatagtcccagctactcaggaggctgagacaggagaattgtttgaacctgggagacggaggttgcagtgagctgagatcacgcccactgcactccagcctgggggacacagcaagactccgtctcaaaaaaaaaaaaaaaaaaagccatggcctctaggccatagtaaattatttgattcatgttctaagtgtaacgtgaatccattaaagaatctttggccaaagtgtgatgtagtaatgtattttttaagtgtattagaattaaaaaattttaattttttttctttccaacatttattttatttattgatttatttaagacagagtttcgttctgttgcctggagtgcagtggcaaaatcttggctcactgcaacctctgcctcctgggttcaagcaattctcatgcctccacctcccaagtagctgggattacaggcatgtgccatcacatccagctaattttttgtatttttagtacagatggggtttcaccatattggccaggctggtctcgaactcctggcctcaagtgatctgcttgcctcggcctcccaaagtgctgagattataggcatgagccaccatgcccagccccatcatttattttaggttcaagaagtacatgtgcagatttgttgtatgggccaattgcatgtaatgggggtattacttattttgcaaaaaatctccctgttcctagattttaaaaataggtggtaaatgaaaaacaatggaaccagtgagataagcttgaagactttatccatatttctagcaaaaatggcagtggatggcactaaagctggcagtgaagctgaacggagtaaaactggttcaagttatgctatgaaaatgaaaagaatcaaaattgatgagatgctggatgtgggaaagaaaagaaatcgaggccgaggggggcagatcacttgaggtcaagagttcaagaccagcctggcaaacacggtgaaccctgtctctactaaaaaataaatacataaataaaataaaaaaatacaaatagctgggcgtggtggcagacaccataatcccggtgaggcatgagaatcacttcacttgaacctgggaggcagaggttgcagtgagctgagattgcaccactgcactccagcctggtgacacagcaagactccgtctcaaaaaaaaaaaaaaagaaagaaaagaaaataagtggaggaattaaagatgaacactagagtatggcttgaatgactcaatgaaatttagtctctaccctgaatggggaagagagttgaataaatcgcttaaagggagaaagttgagtcaatatatacaattagatatgccaaataaacactcatatggagaggggaggttggcggttccaagttggagctctggagaatgttcaggactggagatatagactgagaaatcctctgcttgtggggaattcagttacgagacgaagaattcatcaagtccgtcagtgaagacagaaaagagaaaggagagtccaagattcagccctggaaactcaatattcagagaaggtttcagagcaagaacctgcagaggcgatttgaggagagactcagaaaagtcacggagatgccaggagcagtggtccatgcttgtaatcccaacactttgggaggccaaggcgggcagatcacaaggtcaggagttcaagaccagcctgtccaacactgtgaaaccccatctctattaaaaatacaagaattagccaggtgtggtggtgtgtgcctgtaatcccaactactcaggagactgaggcaggagaatcacttgaacccaggaagcagaggttgcagtgggccgagatcacaccactgcactccagcctgggtgagagggctagactccatcacaaaaaaaaaaaaaaggaaagaaaagaaaagtcacagggaaattgggataatatggtgtcgcaggatcatatagagcagagatccccaacacccgggccgcagaccagtaccagtgtgtgagctgttaggaatcgggctgcacagcaggagaggagcagtgagggagcaaaccttcatctgtatttacagccactccccatcactcacattaccgcctgagctcctcctgtcagatcagcagtggcatcagattctcatacgagcgtgaaccctgctgtgaactgcccatgcaagggatctaggttgcacgccctttatgagaatctaatgcctgatgatctgtaagtgtctcccattacccccagatggaaccatctagctgcagaaaaagaagctcagggctcccactgattttacattatggtgagttgtgtaattatttcatcatatattacaatgtaataataatcgaaataaagtgcacaataactttaatgtgcttgaatcatcccaaaaccattcaccaccctggtctgtggaaaaatggtcttctgcaaaactacttcctggtgcctaaaaggttgggaactgctgttatagaagagtgtttccaaggaagagcgtggtcagtggaatagcattccactgagaccccaggtaagaatgagttgacacaaagtcactgactgggtgacgctaaacagagccattctaaggaagggtggcaaggtcatccacacagagagatctgggaacagagtgagaactgaggaatatggagacttcgggtacatggagctgttgatccattcattgagaagcataagggaaaaattggaagtatgactgcaggagggagagcagtcaaggacagcatttccaatgtgggggccattctagattttggcgggtggaagggagtgatgccctagggtaggagagattgacggtggaggggaaagaggatgcctcgggtgtggctcccacataagggaagagggaaagggacccaagactcatgttaagtagtgtccttgtgtacgaagagggaggcggccgggcgcggtggctcatgcctgtaatcccagaacttcgggaggctgaggtgggtgcatcactttaggtcaggagttcaaggctagcctggccaacatggtgaaacctcacctctactgaaaatacaaaaattaccaggacgtggtggcacacatccgtaatcccagctactcgggaggctgaggcaggagaatcgcttgaacccgggaggcggaggtttcagtgagccgcaattgccactgcattctagcctgggcaacagaacaagactctgtctcaaaaaagaaaaaaagaaaagaaaagaaaaagaacaaggaggcttcttgggtttcagaggaaagaaataggtgaagacgggccagaaacaggctcacagagctgacagtgaaacaatgaggtttttccatcccattttgtttctagtatatcaataaggtatgaagcaagtaagcatatgagatttgggaatgatgaaagaagaggcactaagtgaaggataggaaaagggtgggctcagaatgaaaacagaagttatgcaagaattcactggaatgtatgtatttctggcccactctaggaatagtcatctttatcattcagattaaaatgttttctcctgtatttaagtacccacagttactcaccaccctaagtcctgacaggcaggcacctgcctctcattcttgggatgttggagcattagacggggggacgatacaatttaatgtaatctttctggcataatcgccccacctaggctggaaggacagaagtgggactttatccaggtgcacagcagctacagcaaccagcacgtctgcttcatcactaactcagaagagagtgtgggaatatgagcctttaataagtgcattagagggagatgctactgaacaggaggagggttactccagagatgtgagtgtgcctgtcagtgtaattcacatattatccatttaaaatttggtgagaggccaggggtggtggctcacgcctgtaatcccaacacttcgggaggccaaggcaggtggatcacctgaggtcaggagttcaaaaccagcctggccaacatggtgaaaccccgtctctactacaaatacaaaaattagccaggcatagtggcgggcacctgcaatcccagctactcaagaggctgaggcaggagaatcgcttgaacccgagaagtggatgttgcagtgagccaagattgcgccagttcactccagcctgggtgacagagtaagactctgtctctaaaaaaagaaaaaaacaacctggtgaaaaaatctctgcatcttctctgtcagctggtcccccaaaatcactaactttctccttcttgagagccagaaaagggaatttcctttttcagtagcactgaatcactactgaagatggttagggaagcacatagctccagagtcagcaccttggatgaacctcaggaagggtgactcctgcttctgtccatgaaaaccatgccttgccctttctgttccacgaggaactggaggggccaaggggataacctggaaatataatcgtcatcttctctggtctcctaaatcactcagcttacctttgttagcaaggcgtcgctggggacaaggtacaagtggaacttaatatcttcggggtgggggtgataatagatcaatgtgttggaagtgatggggatggagaggcgagtcccactggcgatccgcagcaggatgcccatcagagagaagctggggctttccaggacagcatagaaaggctccacccgggctggatgctccaggaccatcccttcattcttaaaatgggcaacgagaaaccaggagacgtccacctcacctgctgcaggagaaccacaacagcagtgagacggcacgcaccccagcggcccccacagcctccgctcaccccacattaccttggagggagatgaagtgggggaggtggatttcggcgacagcctcctctggctctgcagtgacatcaaacaaggggccgcccaccagccactgttcatggtgctgcaggtccagggccaggtgctgactccaggaaccaaacgcaatcgtcactgtgacctcatcccttaccaggaagccgaggcctgtggctgaccacagataccagccagcagtggggaaccaaacgctgaaaggagccagagtgatgtcatgacgggagaaccccaggacttggatttaagcagcgatgtgcagagggaggtgggatttgaagtgaggcaaggttcaggacccatctgcgactttcactacattagaaaacgctggggagttcattaacctctctgggccccaatttctctgcattctatatatgttgaaattaaaataccaacttcacagtgcatgaaataaacatattattgatgaaattttagctatcataagggatggaaccgatacgcttccttttgtatttatatttttatttatttatttattttgagacaaagtctcgctctgtctcctaggctgcagtgcagtggcgagatctcatctcactgcaacctctgccccctgggttcaagagattctcctttctcagcctcctgattagctgggactacacgcgggtgccaccacgcctgactaatttttgtatttttagtagagacagggtttcgtcatgttggccaggctggtctcgaactcctgaccttgtgatccgccctcctccacctcccaaagtgccgagattacaggcctgagccaccacgcctggcctacacacttcctttatatcagagtggttttcaaatcatcagcatcttccattcttacctgtatctgtttgtgctcttatcaatcaactcaacatccacatttccttcaggccccagaaactgacgatttttataatcttcttcgatctcaaaacagactttagaagcataagaggaaactatttgattctcttctgagcaaatgtctcctgaaaagaaaatactagacatgtaagaggtaaagggttggaagaggcatggcctgaaggactcctggaggctgaattgcacaggtgctgttgggatacagatatcgaatgagagctgagagtgaccagaatatgcagtttcgcttctttgaatccagacaaagaaaggcacaagaatgttccttgtcatgactaaacgtatacaccaaattccataagactttctgggaagccaggctggacagctttggtgggaggcaccatttgctgaggactggaaccaatgcacctacatttctactggtccgaaatagcagaagacactttctgctggtgaggaaagtccaggtcagaaaagtatcgaactccaaagatgcagaggcgaaagagcgtgcatccttcctaggccctgctgctgtccccagccaccaggaccacccactgactcccctgagcatttccatgccccagcagtgacaggcttacatgtccccatttaaactgcacagtgcactgtggcaaaggtaagggaaagcactcctgatctgcacaaaagactctaaattgtcttcttcacataaaatcacagaacatttccatcaatccacacgcccttcactcctctccctattagcccattacctgaatcttgtccctctgaagattcctgctcttctgatacactggaggttgggatccccatgttacaaaaagatgaaaaacatcaagaatcagttgatgaagatgaagacgatgttattgaaaactagagctgcactgtcccgtagagtagccgctacccggatatgctatttaaatttgtatgaattaaacttaggtaaactttagtttctcagttgcactatccatatttcaagtgctcaacagctacatatcactcacggctataacactgtgtagcagagaatggaacactcccgtcatcacagaaagttctcttagactgggcggatctagactatcaagaaatagaagacattttgaatgaagatatttttatccacatttataaataatagagataacacactcccttgagccaaatgtgtcttgacatctctccttcttctctttgtattatgcccacgttcaatgtggacacagccagattctctggcttaaattgattgctccgattggtatcatacgatgtcggaatcaaagactgaagcagtaattcaccaatgcgtaaaatgtatgcatttatattccaaggtaattccaaacttgaccacacctgggaagctttaaaaaccacccaataccaggtcacagcccacatcaattgaatcagaagtctggaggtggcaccaaagcatcggcgctttcaaagcctcacaggtgattccaatattagccaatatgggttctatgacatacagcgtgagccaatggttcgtcatgcctctggagagaaacctgccctaacacaggtgataccttctggagcaaggcaaccaactccatcaaattctctgcctttgatccattccttgagatatctgtttatttcgacgtgaaagagaccagcagagaaactgacacgtggattaggtttaaaaagaacaggtacctagagaagtgggatgaagagaaaggctttacagcgcttttctcggaaggattctgtgggcaagccaagcatggagagacccctgggctgacatcctaagactggttgctgtctgcggctacacattttgctatggattcgggtagctacaggcaaagcagcaagagtaaacatgccattttatattctctttcctggtgcatgtgcatgctggagtctgcctgctgaggaggggtttagaaagtgggaggaacccagcgctgaactgcagacagcgcatcccagatcatgagagctgacggttccattttcagggcttttgcaaccaagttgttcaacacaaccattagtctaaattaaatgatacaagctaacatttaaataaatcatattaaaaacaaaagtaatacatattaaaacataccaatttccagtcatttttctacacttttcagcagtctatgcccttgaggttatttatgtctcttgtatctgtgtggtgaaagcaggatgacagacttctgcatgtgttctttcaactccctcatcaggggcttcacgttggtagtttgaaatctgccatgatggggatattcaacccttggaaattggcataccctacaaatagacgcattctcccctccccggtgttaaacctcaggaccccactgtggccttcagcctcatcatcagccagtttcctagagaattaggttggttttatgtattgagtaacagcttaaccaataacccactggtcttcgattgcattgctcattgcctttttgtgtataggttctctagacacctccatggaagaaaacctcattgcttaaggtttgtttcaaaaatttctggattcattgctagtattgcataagctcattcattctcccctgagttcgatgaaaaacacccaaattcctctaattctcatgttcctctgtgatattgagacacagcgtccaatagttttccaacggaatagcttttcttacctgggaatgtcccccccagatagttgacactcaggaacagcacggaacaataatggctctgcctctgtctcatcatcttcttggaaaaaatgtgagatgtcacaaagggtctcagaaacacagggtagctccctgtataccctggaaaacaacaacagaatttttactatgaatataaggtaggtgcctgatgatagcataggctgtgcaggaagattttatgttaatagccatagactcaatattttatcttagggaagtcattcctcaggcccctacgactccatctcacctctcagactcccatgactctttcttacatctcattatgttaaatttaactggctctctgtttcccactatatgctgctctttccatcctaggaagcagacgtcagtcagttctcaacatctagcatttgccacaaacattggtttcataataggtcaacaagtatgttgacctatataaccttgctaagaattttagggaaaggatgagattcctaatttgtagtctcccttcatccataattggtgcccgagagaataggaccctaaaatgattgggattgcagggcattagtgagattgggcatgttttataagaacccatggaacagttatctcctcttctcccttctgcctgcaaatggtgagaggggttgcataaagcaacaaaaatgctcacagaaaaagaaaattatggatattgtacacactttcttttcccatcaaggatccttattcagatatggaacatgagagtcctatgctagatccttttctcttcttcatttttgaaggcttggtgctgtcctcctatggctggcaggaatcaagattgaggttaggagtgatggagtgtcctttatgccaagatattcaatggccaatatgacagccactagccacacctgcctatttacatttagttttaaattgttaaatgtgaaaatcagttcctcctttgaagtagccatatttcaagtgctcaaaagccacacgtggctcttgcctgccaccatgtaagacatgcctttgctcctcctttgacttctgccatgatggtgaggcctccccagccacgtgaaactaaaagaatttttctgggtaatggacataggcataggacgtctggcaacaaaatctgctttgaagaggactccagggaatagagatgaggtctcaggctggtcttgaattcccggccccaagaaatccttccaccttggcatcccaaagcactgggattacagtcatgagccaccgcacccagcctgagcattactgtttgatagatattcccaaatcactctccacaaaaggttacaacagtgaacacttccatcagctgaatatctgtgaaagcaattgttgagagattttgaagtaagttcaaaaccaaactgtagaaaaaaatcattgacaaaaaaggaaagcaaaaaaaaagaaagaaaataactgaggaattattactgaagacaacttttgtctaaaaaaaaaaaagaacatttgtttgcaatgtaaaatcgggtttcagctggaaaattaagcctgttaaaaacatcaacaacaagagcaaaaatcctgaatattttttcagcaattctgattaaagtatgtatgttaaaaaaagaaaaagccatgtgaggccagtggctttcacactggacaccacagacagggaacatttccatcctgggtgagaactctattggacagcattgactttagaacctctgctgtagtccagttgaccagagggtcctgccttgggctatctgccattggtttcatttctatttttatttttattttttaaattgagacagagtctggctctgttgcccaggctggagtgcagtggcatgatcttggctcactgcaacctctgcctcccgggttcaagctattctcctgcctcagcgtccccaatagctgggattacaggcatgcaccagcacacccggttaattttttatatttttggtagagacagggtttcatcatgttggccaggctggtctccaactcctgacctcaagtgaaccacccgccctggcctcccaaagtcctgggattacacctgtgagccaccgcacccagtctgggataggttttattaaacaaagtagttctttaagctctaccatccatggtccccggcgtgcagcactgcttttaaaatatcccatgttaaatgggtgcatggaccaagcaagactgaggaattcctgtcctcattagcagtgcttttcagcctgtgaaatatcaccctgaaataaaatctatacctgagttaacagtactgtatcaacatcagtttcctggtattagcaatgactgtttgtattgggtcattctggtttttttgttttttgtttttttgatggagttttgctcttgttgcccaggctagagtgcaatggcgtgatcttggctcactgcaacctctgcctcccgagttcaagcaattatcctgcctcaagcctcctgagtagctgggattacaggcatgcgccaccaagcccggctaattctgtatttttagtagagatgggggttcctccatgttggtcaggctggtttcaaactcccgacatcaggtggtccgcccctctcagcctcccaaagtgctgggattacaggagtgagacaccgcgcctggcctgtattgggtcattcttgcattgctatagaggactgtctgagactaggcaatttacaaagaaaagaggtttaattggctcatggtgctgcaggatgtacatcatgggaccagcttctgcttggtttctgggaggcctcagggacgtttaactcatggtggaaggtgaagtggaacaggcctgtcatatgatgtcagcaggagcaagacagtgaagggggaggtgccacacacttttaaagaaccagatcttgcatgaactcagagtaagaagccacttatcaccaaaggaatggtgctaaaccatttatgagggatatgcccccttgatccattcacctccctccaggccccacctccaacactccatcacatttcagcatgagatttggaagggacaaacatc[132 bp omitted]catggtgaaaccccgtatctactaaaaatacaaaaattagccaggtgtggtagtgggcacctgtaattccagctacttgggaggctgaggcaaaagaatcgcttgaaccccagaagcagaggttgtagtgagccaagatcgtgccactgcactccagcctgggcaacagagcaagacttcgtctcaaaaaaaaaagaaaaaaagtattatcgtgaggggaaacttggtgaaggctacatgggaactctgcccttctctcccaactactttatcattaatattgttattattttttttgagacaaagcctcactctgtctcccaggctggagtgcagttgcacgatctcggctcactgcaacctccgcctcccaggtttgagcaattctcctgcctcagcctcctgagtagctgggattacaggtgtgggccactatgcccagctgatttttgtatttttagtagagatggggtttcaccatgtaggccaggctggtctcaaacttttgacctcaggcgatccacctgccctcgcctcccagtgtgctgagattacaggtgtgagccactgggctcagaccttttttccctacttcttatgagatacaaactcttttgaaataaaaacttaagataacaaagaagaaaagtaacatatatactaatttttatgcaaataacctgcatgtctttgcttcttatgaatgtacataaaccaatggagcaaaattccaaatctttaattttttcccaacaaatagatgtcccttacgtatcatttgtcacacaggcctcagcctgaaaaaaaattccagtttttgtgtattgcagttcccgtatgctattgtcaaccaacagtttccgtgatccttgtagtctaatgagtttggatgcatctatgttcctactggatccactgtccctgggaaaacacaaatggaattggaatgtgagcatgtcagaggagctcgatggtgggacaatctcctcactgtgatgtagcgaaagtagcccgatccttagagatatccatccttagacatgcccatccatagagatgccatccttagagatatccatccttagacatgcccatccatagagatgccatccttagagacatccatccttagacatgcccatccatagagatgccatccttagagatactatccttagagatgccatcctcagagatgtcttagagatgcccattcttagagacaccttcttcgatgcccatgctagaataaaataccattcctccacatttttattgaactaactgcattgctgttaccacttcgtagacaatgatcttatctcaggaggcatgcctcctttgattctcaatccctgatgttcatcacggtctgtcacacttggtgatgctcgctactggcttctgaaaggatactgtgtttttgtaaactataggagcataacaagggccccactcttctatccttcgttggtcctaaacaggagggaatgttaaccagatgaagttgtttgcacaacactgaatggactgagcttatttgaaggtaggatctctttatttagtgtgagcgtgtcagggatgatggacactagagtgatctgcattcactgcctttcacagacatcactcagcagtgacagacctgtcaaagttgttgcttaacctctctgagtatcagctttctaatttgtaaaataaggatacagtactctcgtcacaaatccttgtggtgattaatcatagaaggctaaaattacttagcgcaagagttggaaacactgggttcccaaagcaaacaattcgtcctagtccgtggtcttttatgcatgccagatcatctgtctcagtcatttcagacttttttttttttttttttttgagacagagtttcactgttgtcgcccaggctggagtgcaatggagcgatcttggctcactgcaacctccacctcccaggttcaagcgattctcgtgcctcagcctcccgagtagctgggattacaagtgcccgccaccatgcccagctaatttttatatttgtagtagagatggggtttcaccatgttggccagactggtctcgaactcctgacatcaggtgatctgcccgcctccgcctcccaaagtgctcggattacaggcgtgagtcaccatgcctggccaaggttgctatttttaaaacctatggactgagaagcttgtgaacaatataaatgtatttgtcacagctctggatgctggaaagcccaggatcaaggtgctggtagatcagtgtctgctcctgattcatagagggcagacttcttgttctgtccaagcatggggaaagagaaaggagctctccagggttccttcatgagggaactaattccattcatgagggcgctacctttatcacctgacacctctcaaaggccccatctcctaacaacatcacattggaagttaggatttcaacatattaatattggaagaacacaaacattcattctgcagcagtgtctgaattgcatacatgaaatatttggtcagattaatttgttttgagttccaagacaatgtaaaacagtgcattcattttctacaaatgagacataaacctggtgctgatgaggagccactgaaacacacagagggagggcttagtgagtcaggctgcttggttctgctctgatctgggcgccatgctatgggattgtcaagagcgtggtcaaggccataggcccatgcatcaaggaaagagctggaagaacagccctagactcgcttttgctcaggtatgaagttgccatggtcagaatcaaggaaggagagagaaggtctaaaaaggtcagaaacagggaa[212 bp omitted]gaggcagaagaatcgcttgaacccaggaggcagaggttgtagtgagctgagatggtaccagcgcactctggcctgggcaacaaaacaagactctgtgtcaaaaaaaaaaaaaaagtacacctgggtgcccatgggagttttcccttcattcatgcagagatgggtgaatgaataaaatgtgagcagaacctttcttccagaaaacatccatggtcctctgtatctcatgaactataacgaaacacagaagaatcagccatcaggagccctcacagagcgcaaagtcactcaccgtctcggcagctcttcctcactgctgctactcttttctggacactcctttttttccatttgtcaaatgtggtatttatgtctttactgtatcttttttaccctgaaaaaataaaaggaggttgtatttaggtacttgggaagaaccatcagataaatcttagcttctgtgtctctcaaaggttgacaaaagcgcttattgctcattcacaagagatgcatcagtggaattgctcctagtagtggtaggtacttgggacagaggccgaaacaggagagttgtaaaacagaaactagaaacttcctttttttttagatggagtctagctctgtcacccaggctggagtgcaatggcgagatcttgactcacagcaacctccacctcccgggttcaagcgattctcctgcctcagcctcctgagtagctgggattacaggcatgcgccaccatacccggctaatttttctatttttagtatagacagggtttctccatgttggtcaggctggtctcaaactcccaacctcaggtgatcggcccgtctcggcctcccaaagtgccggattgcaggcgtgagccaccgtgccctgccggatttttcaaattcttttatttttgatgtggccctgggtctgcaagttaagttatgcagaacaggaacttctaaagattccaacctgacagaggcaaaagtgtgattattttccttgccttccattcttctctcgtacaactctaatcgtttttcttgcctaaattgtcaccttgatttctttaaaatacttgggtttaggaaccgttgtctaatccattaccttcaccggctctgctatgacattttttaaagattagatttttaaaataatggctttatggatatatagttcacaaaccacacaattcacccacataagtctacaattcaatgttgtatatatagtaatgaagttgtacaaccaccaccacaatcagttttaggacagcgtcatcacctcaaaaagaaactcattaagcggcactccccattccccacaggcacgcacacccagccacaggcacccacgcatccaccttctgtctccataggttgactcattctggacatttgatttaataggagttgttatggaccgaatgtatgtgtccaccctcaagttcatgtgttgaaatcctaactccaaatgtgatgataggaggagatggggccttcgggaggtgatgaggtcatgagggtggaatcctcatgaatggtctcaacgcccttagcaaagagaccccagagacctcgctcccgctttctaccgtgggagggcgcagcaagaagtcagccgtctatgaacaaggaagcaggtcctctccaggcactgaatgtaccagtgccttgatcgtggacttcccagcctccagaactgtgagaaataaattctgttgtttaagccacatagtctatgatacttttgttaaagaagcccaaagtgactaagacaggcatcaaacaatatattgtcctttgtgatggattctttcacttcccgtatgttttcaaggtccatccatattataccgcataacagcacctcctttgctttcatggctgaataatattccaccgtatggagacatcacatattctcttatccattcagcagacgatagacatttgggtgagttccactttggggctgttatgaaaaatgatactgtgaatattcaggtacgaatttccatgtggacagattatttccttctcttgggtacatacttaggagtggagttgctgggtcatatggtaactctatgtttacccttcaaggaactgccagactgttttccaaagcgccaatttccgtgctcgcttcggcagcacatataccaaagcgccaatctccattcccaccagcagtgtaggagggggccagcttctccatatcctcacctataattgttattatgggccttttgaaaatggccattctagtacatgtaaagtgataagttattgtgatttttgaagattaacttttatataataataaaaatacatattattaatagcatttcagagactctggataacagaaaagataattagtgaaatacaaatcattaatttgtaattagtcaccaggctgctccacctcccaggttcaagcgattttcctgcctc[135 bp omitted]agcctctcaaagtgctgggattacagacgtgagccattgcccctggcccagagaaataatctaaagatttgaattccaaaaccctatacaaatgttttattttaccaccactgaatttatctgcaataactgaatgtctatttatatgcataataatcactcacaggttccaactaaacaaatatttctatccaattttcaataaaaatattaaaatctgcatatttaatttattcatgtttaattattatgcttctcacagcctgcgaaaaatttaatttagctatcctctgaactacaagcttttcctttgttataacgaacacttttcttttacttaagtatcgttattccagagttaatatagtatgcattcaaattacttcttatttagtattattttacctagtaccattatatatttaattttttctcatgaagccaggcacagtggtttgtgcctgtagtcccagctactcaggaggctgaagtgacaggatcccttgatcccaggagattaaggtcgcagtgagctatgatggcgccgctgcattccagtctgggcgacaaagcaatacctcatttcaagaaacgaaatggaattttttccttataagaatcttaaagaaggtgtacattatcttggctaactttctataggattaagtagaagttattgagacttggtctacagtcttctttttttcatgagtcaaaaagcatctctcactttagttacacctgtattaggagagttatgatcaattacagcagttgtagtttctgagaacttggataaatacaaacctgaattacacagaatttatgtaaatccagatattcaaaaatgagaaataatgtaatatatgaccaaagtaatatcaagacaacatacaattaaatcactcaacaattactgggaatatgtatcaaggcaagaattgtaaaattctacctggtacttctgaaatgaacaaggcaatgagaaataacagtttatcttgtctattactgagtatcaatgaaagcaataaggtgaacggaaaagtccatgaaaactccattttcagaataatgaggagacagatttaattcacagatccaaatgtttctcaccggctgacaaaactgtgttaagtcagggtgaagcatggcggaggaacagggaggaagtgcagagtgagaaaacataaagaagtcaggaagtgccagaggagtaatttcctgtgagtaaagcctcatactcggtgatttatctatagagtttgaatacaagagctgtgaggtctgggcaggtagagtggaggctgagcaggagataaatgtggtagaggcggtgtggatccttgaaaacagagaaatgccctaatgtgacagagtacagaaatactacaaaaacacacttgtagaaagaacattctgcatataatcaggcatggaacggtcccatgcattccataataattaagaaaaagatattaccagagcattgcttaaaggcactacaagaaaataggtgagaagaccaggaagttgttgttttttgttttgttttgttttagataaagaacaatcaaaggaaaatgatggacccaagttaacaatcactcttggggggaaaaaaactccacccacaattcctaagtaaaaaggattacacacattctcggcataatatgtctctctcaggccaaaggataaccttgtgcttcatgtggacactatgaaatcattccagctgaagtcaggaaaataccaagaccttccctatttaagttaaaatatcggaagcttattccaaaatattggacaaattccaaatacagtgattgaaaggaaggagattaaactataactcactacacgttattttcctctatagagaaacataacgaatcacctgaaataagctacaaaagtaagataaaccagtaagttagagaaagaatctttttttttctttgagacggggcctccctctgtcgctcaggctgtagagaagtggcacaatctcggctcactgcaacctctgcatcctgggttcaagtgattctcctgccttagcctcccaagtagctgcgattacagacatgcaccaccatgcctggctaattttttttgtatttttagtagagatggggtttcaccatgttggataggctggtctcaaacttctgacctcaggtgatccgcccacctcagcctcccaaagtgctgggattacaggtgtcagccaccgcaccagccagaagaatcttaatatacaaaagtgaatagcttcttaatataacagactatcccaattccatgaaagaagaaaatacactcattaaaatagcaactatggtacctagaactaaactatacaaaaaaactacatgacccatataatgcttttattttgaaataattttaaacattgaaaaatagcaaagattcacataaatcctcaaccagcttatctgaatgttagctatatataattgtattatatataaaataattgttatatataaaataactaatttattgtattgtatattgtattatatatacatttattgtattatatataaataattgcatatctacatttaatatattatatataatatacaattgtatatgcaattgtaatatgataattacatatataatagtatatataatacaattatccaaccaggaaattgatgttagcatatcataccattacttaatgtgcagaccttatttgaattttatcaacatttgtctgaatgtcctctttgttctccaagatctaatcgaggatctcacattgcacttacttgttatccctccttagattcctccagtctgtgaccgtttcttattcttcccttgtcttttgtgattgtgacatttttgcggaacatggtcaactattttacagaatgtttatcaatttggatttctttgatgttttctcacgattaggctgaggtcatgcatgtttgtcttctgtgttcagtcaacatgccccgtcctttttggaatatttcttcatgttctggagtcacaatttgttccaatgttatcctatatactcctgccccagccctggaagtaaccacttctccacggatccttggctcccttgtattcaaaaacagtatttagaaaccaagatctggaaactatgtgtgtttacagctactaagatatctttgtcctaatctctctcagtggaaagacctggggaatccatgcatgtataccgaactgtgcctacacatgcctgtatttacttctcgatagatagactgacaaacagatagacaaatagagcagagcaaagagctattctgatacatgaaatagaaaatcaataataaaaaaaaacattgctctagaaataggtagacaaaggatatgaacatgaaattcacagaaatggaaaaataaatggttcccaagcacgtgctgaatgaaaaaacaccatgctgaatgaagattaaagctactcttgaatattttttctccatgaatttggaaatcatgcgaaagtctgaaaactcatctactgacaaggctgtgggaaatctgacattctgatattgctgatgggagtgtcacctgctattcattatatggatggcaactttatggacatctttgaacgcataaatgacatcccatttggaatggtaaatcaattttgaggaattgatatactcctatacaaatatacttacctatgtatgaactcatgctcacatgtttactcactgtggcactcttcataaatacaattgaggccaggcgctatggctcaagcctgtaatcaccacaccttgagaggccaagccgggtagatcacttgaggtcaggagttcgagaccagcctggccaacaaggtgaaaccccgtctctacgaaaaatacaaaaattacctgggtgtggtggcatgggcctgtaatttcagctactcgggagggtgaggcaggagaatcgcttgaaccaagaagtcataggttgcagtgagccaaaatggtgccactgcactccagcctgggtgacacagcaagactccatctcaaaaattaaaagtaaaataaaataaactaaaatttgaaacaactgaaatgtttttcaataggggaatgaataaagacatcatgatacatccgatgatgaaataatatgcaattttaaaagaatgtcaaagttcactaaaaactgatactgaattatcactaagatctattgttaatgaagaaaggcatagtaaacaacatgtaaactttctactcttcaagtaaagagtaaaaatttgtatatgcataaagaaactctggatatatatatatacagtaacaccacagtacatattcaactgtgtttggggagcagactatgtgaatttattaccctttataaagtaaacaaatggtttaaaaacctccacctaaaattttcacacgcaaaattttatatatatatactatactttcatgacactatgttattgtatatatatatatatatatatacacacacacacaatgcttccatttgttttgatgtcacacaagcaaaattaaattacactaaattttaaattttaacattaaaatacacatgatttttaccatttgtgatacacattgtatcatatgtattctcaattgaaatttcaattaaaattcagttaccactcatcaaattttactatgactatttcaactgaaaacattttcatattgcatttaaaaagttttgacggtttacttttattttagaaatcaaattatttcatgaaaaccaaatactcttcaccttaaattgtcttttttactcccatgaaaatctgtattcatcttcacaagaaaaaaatgcaaaattacattctttaaagttcaaatactaaaattcttgtatagtattttatgtgacattggaaattttaaaaaacatgtaataaaaatcccagtcacgcatgaagttatagccttgcctgcacgtattgcctgtagccccagccacccggaggccgaggtgggaggatcacttgggtccaaatggctgagaccagtctgtgccacacagcgaagccctgtcatttaaaaaaaattcctaaacttccaaaaattggaataaaattcattattccttgacatattgaagaaacaaacaacagagaaatgaattaatgatataaataaggaatcaaaaggataaaacacaaatgtcctgaaaagatgttaaaattcactagtaatcaggggaatgtgcatgacaaccactatcagttatcattctcacccacaatactgatggaaataagaaaagctgacaaaatcaagtgtgaatatgaatgtgtagcaatggaaactcgtaaaccagtagtggagatgactgaaaacacagccgctttggagaataaactggctgtatctagacttcaagacacacctacccttgaaattatgtgtggacaagaaaatgcatataaaaagtccattgtattatggtttgctatcagaaaacagggtaacaaactgaatgtccatcatcaaagaatggatacattgattataatatcatcattgcattaatactgtagcgcagttaacataaattattaaaaccacatgtaaacatggataaatatttaaaatgtactattgggccgggcacggtggctcacgcctgtaatcccaacactttgggaggccgaggcgggcggatcacctgagatcaggagttcgaagccagactggcaacatagtgaaactccgtctctactaaaaatacaaaaattagtcgtgcgtggtggcgggcgcctgtcaccccagctactcgggaggctgaggcagaagaatcgcttgaacccgagaggtggaggttgcagtgagccgagatcacaccactggactccagcctggatgacagaacgagactccgtctcaaaaaaaaaaaaaagtaatattgattaaaaatcaaattgcatgagactgcacagcacgataccaagcaaatacaagttttaaatattacagaaaataatatttaaaatacaaaccaaatacataaatcatgcagggggattaagacgtttctggatagtggcaacagccgagagtggctggatgaatttcagagaaatttcatatattgcttcaattttatttaaaatatattattacctatgttttagatattttattgtaaataatgggcaaggatattataaactctgcagaagtaagtgtagtcgtgttttttcctactcacattgaagatggcccagatgcttgcactaaccgcgtttaccgcccacagccatcatggcgaccggaagtcctgagagcttgtttccctcgaatctcagacagccctccttctctatgaacattatttcaaaagaagttgagaactagagaaaccgaagcttaaggggattctcccatttggcctgtcctcccctaaagtcaccacctgctgcgtttctgcagcgcttaccatgtgagtttcaggagccccagggtgcaggaaggaggagcggaggcttgttgcttggacactgccaggctgctctgtgttctgttcctcttggtcacttgagaagaaagggagaagttcctatgaggctgtcggaaagggaaatggggccctccgcttgttgaaaacaaaacaaaaccctcaggaagctttgcatcctgttagtcatagcttaaatttatgacttcaatgacttggctgggacagtcttaatctctccatactcaagttgttttaatttctgtaataataatttttataccaatgtttgtgttgttaatactaataattttacattgtaactgtaatcctttaattattacaagtgttaacctaaataacaaacatatgaaagcttcctaaaggaaacagtgtttatttgggaatagagcattgcaattgggaatagatatgccatattaaactatgtatatattcaggaagataaaggaagacagaaatggggaggattgcatattgttttgacaggattttccttggccacaggatcaggcacaaaggtgacattagtctgaggttggacaggcagttgctgggcagcattccttgcagaaatattttttgtttaaggttgcaatgacctttatgcaaggttgtgggttttgtagagtctttttcattttcaagcatacaaggataagaccccccctcttcatggctttcctggctttatttgtcagggtcatcttaacattagtggctccattttgttctgacaactttcagatttctccttgtgatcaagaactttctctaaaagcattattgatcaatcattctgtaattaagatttgatgtcccctgatgccagcatggacctctcccagtttgctggtctcatcccatgttgtggggagtgactggtgactaggaatcgatgtcaaaagcacatttgagcaacaaaagagatttgaaggatgtggctctcaggctaagtctccctggagtccattagtaagttcaattttgtctgttctacagtcttttgctatccctttaaagtgctgattcagtattattttgttaggagctgcacctctgaaaaaatttaacaagtaacacatacaaagtttaaaaaggagaaatacaaagtaaggggaaatacaaattaagagcaatatgagattttcagtttgcatatggttttgagccataaacctaggtttaaagacaactaattgaagaactcaaacagttattcgagacagcagggagttaggtgagacctggggtaaccacatggcctgctttcttattttgtgtataggagcctcaacttttctcagaggaatttattcaggtatagcatgtcgtattagcaacatcacagacaatttcttgcttaaccaatggatactaaagaattttgtaggttgggttctgttaagttataagcagaaggaattgatcataaaatttaagttacaccattattctgctaagtagaaaaggtcgaattaagtgagatgaaagtctcattatgatatagagtcttgtttcagcatcttgcagaaagttatacagtgtgaaaacaccaactttttctcctggtttgtagtgtgaacgtctctggttatgatattgggcagtttggtaaactattgtgtgatccgcatatcagccttgaggtttgttccctctttcattttcctctggatcaccaacatgctaatctacgttcacatcactgaaaccgtagaggccaataccaatttcaccatttctggtcctggatatttgcaagactgttgtcaaactaggccatacatacaataatttaatatacatttggggcttggattatatttctgttaaattgcactgctctatgggacttattttattcattccacaaatatattttgcacatgttccttattcttggtactatttaatggatttggcatacatccgtgatctaaacagataaaactcccccaaggatcatttataaatgtcatggtgattcgccatgtcctgtttgtgttcctcatggtctggaccagcatcaacatggccagtctcctctgcagacaccggcggagagcccagcgtctgcacagccctagcctctcttcccagccatctcctgaacacagagccacccataccatcctcctgctgcttggttgctttgtgtgcttttattgctcaaacaacttcatcactctttatttcttttataaatctgagaaaaaatcaagactagagatgatcactggaattatttcatcatgctacccaaccatctgcccttttgtgctaataaaaaataataaaattatttcctaatttacctcttcctctctaagacaagaatgatcagctctcagggagcattcaatggctgatctcaaaccccatactttcttctgcagctgggaagtctccatgatgacttttgtggagaaaaagtcatgcagttattgagcaattgaattagggctagtttgaattgaggtgtatcataaatttaaaaagcattcaggttttgaagtcaatataaataacagtatataaatattatcttaataactttcacattgctgacaagtttaaattatgacattttgggtaaaacgtatgtatatgttttgttatgtttacatatatatgcatatttaaataaaatacatatacacaaatatgtaagtaaaacatatgtaagaatatatataatatatataattttttttttttgagacagagtcttgctctgtcacccaggctggagtatgcagtggtgtgatctcagctcactgcggcccccacctcctggattcaagcaatcctcccacttcagccttccgagtagctaggattataggtgtgcaccaccatgcctggctaatttttttgtattttttagtagagacagagtttccccacgttggccaggctggtctagaactcctgacctcaagtgaaccgcctgtgtcagcctccaaaagtgctaggattgtaggtgtgagccaccgcactggccttatcagtatatacacacacacacacacacacacacacacatatgtgtatacatatacaactacataggtatttttaaactaactgtatctgcttgtttttgcttttttaaatgcagttgctagaaaatttaatatacatttggggcttggattatatttctgttaaactgcactgctctatggcacttcttgtattcattccacaaatacattttgcacatgttccttattcttggtactatttaatgggttggacatacatccatgatctaaacagataaaacataatagcacaagagattatacagaatgtttgtggtacaggaaaacgtatatgtacacatgataggagctaaaaagaataggactggttaagagaatgtggtgtgtgagagtacaggtgcagggagctgcagtgactgggattacaggtatgcatcaccatgcctggctaatttttgtatttttgtagagacggggtttcaccaatttggccaggctggtctcgaactcctggcctcacgtgatccacctgcctcagcctcccaaagtgctgtaattacaggtgtgagccaccgtgcctggccaacatttatcattttaaatactcatctgcaaaaatgtttccaagtggggccacttccccacccctcatatgacagtggcagtgatataccatatacatggttattaaaaagaatctggagcaacaatatgaatgtcagacaaattaggcttcaagagcatttccctccatcttacaggggataaacccaaagaagttatattaagattccaataaaagaatgcaagatgactatctgtgtaaaaatgtaatcaatggggagcaggtgcacctccaataatattagacaaaatatattttacctaaacagcattactaagtataaagtagatcacttcaataagaataacaattttaattttgtgtatacatattcacactttcaatatgtatatagtatacacgggtagaatgataaacagatatagaataatcctccactcttgtgggaaatctgttcaatagtctttcagcaattaacagaataacagagtatcagtaaagatataaaaaattgaccaaagcaattcatattcttgacttaagtgccctagaataacaactcacacagccattgaagaatccccatcatcctatctcaagcatagaggaaacacatagcatacatatgtagccacatagcaaacacagaaatgactatcaacaaagtggaagagtttaatgcacagattaagttatctgaatatatgtacaatgagttataaataataaataattgagccaggtgaagtagtacatgcctgtaatcccacctacttgggaggctgaggtaggagtttgagcccaggagtttgagtctggtctgggcagcattgcaagatcccatcccccaaataataaataaactaactaagtaatcaataattgaatgagaaaagttagctcatatttcaatatgttcaatcttaggatatatacttctaggcaaccacttagtgacaaaaattctgtagaaatccatcattgaaagttcattatgtaaataaatgtgaagactagataagaaccacagaacacaatgacattggaaaaaatgccacagtaattctttgaaaaaagaaatgcaggcctggtgcggtggctcatccctgtaatcccagcactttgggaggccgaagtgggcagatcacaagtcaggggttcgagaccagcctggccaacatagtgaaaccccgtctctactaaaaacacaaaaacaattagctgggtgtggtggtgggcacctgtagtcgcagctactcgggaggctgaggcaggagagtgctttcagagaaacttcttgatcacaaggggaaatctgaaagttgtcagaacaaaatggagtcacttatgttaagataaccctgacaaatagagccaggaaggccatgaagagagggctcttatccttgcatgcctgaagatgaaaaagactctacaaaacccacaaccttacataaaggtcttcacaaccttaaaaaaatatatatttctgcaaggaatgctgcccagcaactgctggtccaacctaggactaatgtcacccttgttactgatctttgtagccaaggaaaattctgttaaaacaatatgcaatcctccccatttctgtcttcctttatctccctgaatatacacatagtttaatacggcatgtctattcccaattgcaatgctctattcccaaataaacattgtttccggctgggcgcagtggctcacgcctgtaatcccaacactttgggaggccaaggcgggctgatctcgaggtcaagagacggagaccatcctggccaacatggtgaaaccccgtctctactaaaaaataaaaaattagctggatgtggtggtgcacgcctgtagtcccagctacttgggagactgaggcacgagaatcgcttgaacctgggaggcagaggttgcagtgagccaagatcatgccactgtactccagcctagccacagagcgagactccatctcaaaaagaaaaaaaaattgtttcccttaggaagctttcatatgtttgttagttaggttaacacttctaataattaaagttatacagttacagtgtaaaattattagtattaacaacataaacattggtataaaaattattattacagaaattaaaacaaattgagtgtgagagagattattaagactgtccaagccaagtcactgaagtcataaatttaagttatgacaggatgccgagcttccagagggttttgtttttaacaagggaggggccctatttccccttctgacacgctcatatgaacttctcactttgtcgtactccttccttgctgactaagaggaacagaacacagagcagcctggcggtgtcctaccaacaagcctccgtttctccttcctgtacactagggctcctgaaactcacctggtaagcgctccagaaaagcagcaggtggtgactttagggtaggacgggccaaatgggagaatccccttaggtcggtttctctggttctcaacttcttttgaaataacgctcgcagaggaggtgggctttctgagaactgagggaagtaagctctcaggacttccggtcgccatgatggctgtgggcagtcaatggggtcagtgcaagcatctgggccatctttaatgtgggcaggaaaaaaacacgattacacttacttctgcagagtttataatatccttgttcattatttaaaataaaatatctaagacataggtaatagtatattttaaataaaattgaagcaatatatgaaatttctctggaattcatccagccactctcagctgttaccactatccagaaacgtcttaatccgcctgcatgatttatgtatttggtttgtattttaaatatcattttctgtaatatttaaaagttgtatttgcttggtatcctgctatgcattctcatgcaatttgatttttaatcaatattacttttttttttttttgagatgaagtctccgtctgtcacccaggctggagtgtaatggagcaatctcggctcactgcaacctctgcctcccaggttcaagcgattctcttgcctcagcctcccgagtagctggaattataggtgcatgccaccacgctcggctaattttttgtatttttagtaaagacgga[145 bp omitted]tggttacttcgagggctggggcaggaatatataagataacattggaacaaattctgacgccagaacatgaagaaatatttgaaaaaggatggggcatattgactgaacacagaagacaaacatgcatgacctcagcctaatcgtgagaaaacatcaaagaaatccaaattgataaacattctgtaaaataattggccatgctcagcaaaagtgtcacaatcacaaaagacaagggaagaataagaaacggtcacagcctggaggaatctaaggacataacaactgagtgcaatgtgagatcctcgattcgatcttggagaagaaagaggacgttaagagaaatattgacaaaattcaaataaggtctgcacattaggtaatggtaagatacgttgacatcaatttcctggttggatacttgtattacatatactattatgtatataattattatattacaattacatatacagttgtatattatatataatacaataaatgtatatatatgattataatacaataaatgtatatatacagttttatatataacaactattatacatataatacaattatatatatagctaacatcaggataggctggttgaggatttatatgaatctttgctaattttgcatgtttaaaattatttcaacataaaaaaattatatgggtcatgtagttttttgtgcagtttaattctaggcaccatagtttctgttttaatgggtgtattttcttctttcaaggaattgggatagtctgttgtattaaaaacctattcatttttgtacattaagattcttctggccaggcgcaatggctcaagcctataatcccagcacttgggaacctgaggcaggcagatcacctgaggtcaggagttcaagaccagcatgtccaacatggtgaaaccccatctctactaaaaatacaaaaaaaattagccaggcatggtggcacatgcctgtaatcccagctacttgggaggctgaggaggagactcactagaactcaggaagcagaggttgcagtgagccaagactgcgccactgcactctggcctaagcaacagagggagactccatctcaaaaaaaaaaaaagattatttctctaacttactggtttatcttttatagcttatttcaggtgatttgttgtgtttgtctatagagtaaaataacatgtctaatgagttataatttaatgtccttccattcaatcactgtatttcaaatttattccaatattttggaataagcttccaatattttaacttaaatagggaaggtcatacttggtattttcctgacctcagctggaatgccttcatagtgttcacatgaacacatttggcctgagagagacttattatgccgagaatgtgtgtaaccctttttacttaggaattgtgggtggagtttttccccccgcccaagaatgattgttaatttccgtccatcattttcctttgattgttcttcatctcgaaaacaaataataaaataataaaataaataaataaaacttactggtcttctcacctattttcttgcagtgcctttaagcaatgctctgccaatatctttttcttaattattatggaatgcatgggaccgttccatgcctgattatatgcagaatgttctttctacaagtgagtttttgtagtatttctgtactctgccatactagggcatttctctgttttcaaggatctcccaaccacaccgcctctaccacatttatctcctgctcagcctccactccaactgcccagacctcacagctcttgtattcaaactctatcgataaatcaccgagtatgaggctttactcacaggaaattactcttctggcacttcctgacttctttatgttttctcactctgcacttcctccctgttcctccgctatgcttcaccctgacttaacacagttttgtcagccagtgagaaacatgtggatctgtgaattctatctgtctcctcgttattctgaaaatggagtttgcatggacttttccgttcaccttattgctttcattgatactcagtaatagacaagataaactgttatttctcattgccttgttcatttcagaagtaccaggtagaattttacaattcttgccttgatacatattcccagtaattgttgagtgatttaattgtatgttgtcttgatattactttggtcatatattacattatttctcatttttgaatatctggatttacataaattctgtgtaattcaggtttgtatttatccaagttctcagaaactacaactgctgtaattgatcataactctcctaatacaggtgtaactaaagtgagagatgctttttgactcatgaaaaaaagaagactgtagaccaagtctcaataacttccacttaatcctatagaaagttagccaagataatgtacaccttctttaagattcttataaggaaaagattccattttgtttcttgaaatgaggtattgctttgtcgcccagactggaatgcagcggtgccatcatagctcactgcgaccttaaactcctgggctcaagggatcctctcacttcagcctcccgagtagctgggactacaggcacaaaccactgtgcctggcttcatgagaaaaaattaaatatataatggtactaggtaaaataatactaaataagaagtaatttgaatgcatactatattaactctggaataacgatacttaagtaaaagaaaagtgttcgttacaacaaagggaagcttgtagttcagaggatagctaaattaaatttgttgcaggctgtgagagacataacaaacataaacacatgaaatatgtagatttttatatttttattgaaaattggatagaaatatttggtttgttcagttggaacatgtgagttgattattatgcatataaataaacagacattcagtgtaggggccagccctacagggtctgtgggtctttctcccgttgtgcggagacgagagatcgtagaaataaagacacaagacagagaaatagaagaaaagacaactgggcccgggggaccactaccaccaagatgcggagaccagcagtggccccgaatgcctggctgtgctgatatttattggatacaaggcaaaaggggcagggtaaggagtgtgagtcatctctaatgattgataaggtcacatgagtcacgtttccaccggacagggggcccctccctgtttggcagccctggtggagagagagaggagacagcttatgccattatttctgcatttcagagacttttagtacttttactaattctgctactgctatctagagggcggagccaggtgtacagagtggaacatgaaagtgaaacaggagcgtgaccgctgaagcacagcatcacagggagccggttaggcctccggataactgcgggcgggcctgactgatgtcaggccttccacaagagacggtggagcagagtcttctctaactcccccggggaaagagagactccctttcctggcccactaagtaacgggtgccttttctaggcactgacgctaccgctagaccaaggtccgctaagtaacaggtgccttcccagacgccggcattaccgctagaccagggagccctctagtggccatgtctgggtgtgacagaaggctcgcactctcgtcttctagtcacttctcaccgtgccccttcagctcctatctctgtatggcctggtttttcctaggttatgattgtagagcgaggattattataacattggaataaagggtaattgctacaaactaatgattaatgatattcatatataatcatatctatgatctagatctagtataactattcttattttctatattttctttattatactggaacagctcgtgccctcggtctctcgcctcggcacctgggtggctttccgccccacaactcaggtgttgcagataaattcattggtggtaaaataaaacgtttgtatagggttttggaattcaaatctttaaaatcacttctctgaatttccattagatgattattgctaccaataaaattttagtaggtaaacacaaccaccttctaagaacttagaactctcagactgggcacgatggctcacgtctgtaatcccagaactttgggaggccaaggcaggcagatcacctgaggtcgggagttcaagaccagcctgagcaacatggagaaaccctgtctctactaaaaatacaaaattagccaggtgtggtggcgcatgcctgtaatcccagctactcaggaggctgagacgggagaattgcttgaacctgagatcgcgccattgcactccagcttggcaacaagagagaaactccgtctaaaaaaaacaaaaaagaacttagaactctccaatattaaatggccagttccctcagaataaaaacaaaccaaaatattgcaaccaaagtgaactttgaataattaattcaattgttacactttcttcttaagttgtgaagaacttcaaaatgacgtgactatataacaatagtgagatgcaaacaaagaacaaaaactaccacaaaagaaattgtgaatttcattcagcagctttactgttagtcttaatatggtgcttattaggagttggttttgcattgctcagtagcagagatataattacagcttgttttatgtggtaatataatataaaagtataccctctctagccttgtctactgacagaattacgtgcaatgtcacagcaagagcctgatgtatctgcccagaattcttgttttgatctgtaaatctctaatagtaattgtgaagagctcaactcagtatggaaactgatctggtcacgcattttttttcagcatcttaaataaacagcacagagtctgaggccacactatgctggacacactgtaatcgcacaaacaaaattgtagggctttgttccaagatggtgttaagacttgatctatggataagatcaacttgtgggtgattcagaggtgcacccactagttccctgcaaccagaaatggtaaacctacttgtctgtttaaagatgcttgaaacaatattgcagagagaggatggtgagacagtggagtgctgtatgatggtgagtgttaaacacaatttgatttattaaaattaagttgcattccttggatacaaatagttcgttttaaaaaataggcagagtattacactattttttttatttattttttgttctgaagacagagtctcactctgtcacccaggctggagtgcagtggcaagatctcagctcactgcaacctccgcctcctgggttcaagcaattctcctatctcagcctctggagtagctggaattacaggcgtgcaccaccatgcccggctaatttttgtatttttagtagagatggggtttcgccatgctgaccaggcaagtctggaactcccgggctcaggctatccacctgcctcagcctcccaacatgctgagattacaggcctgagccaccgtgcccggtcaccccattttaatatatttaataaaaccaaatagtcaaaaagttaagatggattatttatgggtgtttggattttgagcaatttgtaattcactaattttcttttctgttatccaaagtgtctacaatgctattaataatatctatttttaccactatataaaaattaatcttcaaaaattacaataagatatcactttacacgtactagaatggccatttttaaaaggcccataataacaattataggtgaggatatggagaagctggccccctcctacactgctggtgggaatggaaattggcgctttggaaaacagtctggcagttccttgaagggtaaacatagagttaccatatgacccagcaactccactcctaagtatgcacccaagagaaggaaataatctgtccacatggaaattcgtacctgaatattcacagtatcatttttcataacagccccaaagtggaactcacccaaatgtctatcgtctgctgaatggacagagaatacgtggtgtctccatacggtggaatattattcagccatgaaagcaaaggaggtgctgttatgtggtataaaatggatagaccttgaaaacattatgcaaagtgaaaggatccatcacaaaggacaatatattgtttgatgcctgtcttagtcactttgggcttctttaacaaaagtatcatagaccatgtagcttaaacaacagaatttattgtcatagttctggaggctgggaagtccaagatcaaggcactggtacattcagtgcctggagaggacctgcttccttgttcatagacggctgacttcttgctgcattctcccacagtagaaagcgggagcgaggtctctggggtctcttttctaagggcgttgagaccattcatgaggattccaccctcatgacctcatcacctcccgaaggccccatctcctcctatcatcatatttggagttaggatttcaacacgtgaacctgagggtggacacatacattcagtccataacaactcctattaaatcaaacgtcagaatgagtaaacctatggagacagaaggtggatgcgtgggtgcctgtggctgggtgtgcgtgcctgtggggaacggggagtgccacttaatgagtttctttttgaggtgatgacgctgtcctaaaactgagtgtggtggtggttgtacaacttcataactatactatatatacaacattgaattgtatagtttaagtgggtgaattgtgtggtttgtgaactatatatccataaagccattattttaaaaatctaatctttaaaaaatgtcatagcagagccggtgaaggtaatggattagacaacggtccctaaacccaagtattttaaagaaatcaaggtgacaatttaggcaagaaaaatgattagagttgtacgagagaagaatggaaggcaaggaaaataatcaccatttcacttccaaaagtccttttcggaagatagccttttaattaattttaacacaaagtgtacaaaatatattagtttactaactctagttttgtcttatattgacaaactctttaatatctagatactagatattataaaattaggacccatttgtccagtacctacacaacatatacagtgtagcaaagttaaatgaaatgcaggctgggcacggtggctcatgcctataatcccaatactttgggaggctgaggctggcggataacctgaggttgggagtacgagaccagcctgaccaatatggagaaaccccgtctctactaaaaatacaaaattagccgggcgtggtggcccatgcctgtaatcccagctacttggaaagctgaggcacgagaattggttgaacccaggtagcggagg[133 bp omitted]tctcctaatgtcatctccagattaattttttaaatcacccagggcagcaatctgcaatgtcctctggatctgtgtaaactcttgtgtggcaaatgactgaaagttcaacttcaatgcagtaaaaatataaagagagtgtcctggctccgttgaatgcaaggacagaaggtaggactgaccctagggaggctgatccatgagctccaaaaacaccacagggaaggaacgtttctccaggtgtccaccttgccttccatggtgttggctccacacaatattcacatgaagcttcacatctcacaagagacaaaagggagaagagcaagggcagcctctgatccctcccaatgaggagaagtctcctcgggatgtcacaatgtctcgcaagcccatttcccagccagcttatgtttccaggaagtcagggaacagattaaattttcaaaatcatgcctagaggagggtcaagatgcctgactggacacagcccagaagcaccactcccaccaagagaaaccaagatattggataaaccaacagacttagagaagatcttcgtaggaaaaacaccaagagttgatacagaggcatgcagacaacagggctgaagagctaggaacctgggaatgtggtgtggggtagctgaacgctagggccagttcccagcactgaaaggctcctaggggaggggttagtgaagggacagagggatgacaggctgtcaccacagaccgctgatgtcccagctatgggagactgcccacctcccatagacatttttttttcttttgagatggagtttcgctcttgttgcccaggctggaatgcaatggcatgatctcagctcactgcaacctctgcctctcaggttctaatgattctcttgcctcagtctcctgagtagctgggattacaggtgcccaccgccacgctcagctaatttttgtatttttagtagagatgggggtttcaccatgttggccaggctggtcttgaactcctgtcctcatgacccactcgcctcaacctccaaaagtgctggggttacaggcatgagccaccgcgcccggcctccgtagacattttgtcagaggcatttgaaccagagcaactccatcttgagtaggaggtggagaaaatgaggctgagacctaccgggctgcattcccaaatgatgaaggcattctaagtcacaggatgagataggaggtcggcacaagatacaggtcataaagaccttgctgataaaacaggttgcagtaaaggagccggccaaaacccaccaaaaccaggatggcgacgagagtgacctctggtggtcctcattgctacactcccaccagctccatcacagtttacagatgccatggcaacgtcaggaagttaccctatgtggaccaaaaagggaaggcatgaataatccaccccttggttaccatatcatgaagaaataaccataaaaacaggcaaccaaggccgggcacagtggctcacgctggtaatcccagcactttgggacgctgaggcgggcagatcacctgaggtcaggagttcgagatcaccctggccagtatggtgaaaccacgtctctactgaaaatacaaaaaaaattagcagggcctggtggtgggcacctgtaatcccagctactcgggaggctgaggcaggagaatggtgtgaacccaggaggcggaggttgcagtttgccgagatcacgccattgcactccaacctaggcaacaggagcgaaactccgtctcaaaaaagaaagaaagaaagaaagaaaaacatgttaaatgacaacacaaggatctaattggcaaaactgaaaccaaagaaaattttacagaaaaaatgacctactttctacaacaatagcaatgtttgaatggggggatggaattaaataagtggcaacttagattaacaaagaattaacacacacacacaaaaacctattatagtggatgatttgtatctctatgcaaagcaataaagtaaaaataagaaccagggaaatgacaacattaacgggatattttatgatgtcctgaatgatgattacttttcattgtaagggagtattcatgtaagacagtaaagcattttttaactcttcatcttttaaacatacatagtgatatttttattttttattttttatttattgatacagagtctcactctgtcacccagagtggagtgcagtggcaagatctcagctcactacaacctccacctcctgagctcaagtgatcctcccgcctcagcctcccaagtagctgaagtagctgggactacgtgcaccacacgcctgactaatttttttttttttttttttagagacagggttttgccattttgcccagggtggtctcgaactcctgagctcaggcaatccacccacttcggcctctcaaagcatgaaccactgtacctggccatcgtagtgatatttttacaggtgaaataatataatgttcccaattttctttaaaaagatccacctagcagtgaaggcataggtgaaacggg[143 bp omitted]tcctggcttccagcgattctcctgcctcagcctcccaagtagctgggattacaggcgtccaccacacccagctaatttttgtatttttagtagagactgggtttcaccatg[137 bp omitted]agggaagcactgctggagatgaagacccagagaaaatagaagggaattggacacctacaaccactagaggtcgcaagaggaatatcctttagtgccctgagcccagacctgaaccaaggtttaacagggttcttctcaagtccttggactccttcggtcataatttgggagcctccaaaaaggagagcctgaaatgagggcttacgtgcaggtagtttatttggggaagaggtcagaaattttcttttttttttttatggagttccgctcttgttgcccaggctggagtgcaatggcacactcggctcaccgcaacctccgcctcccaggttcaagcgattctcctgcctcagcctcccgagtagctggaattacaggcatgcgccaccacgcccggctaattttgtatttttagtagagacggggtatctccattttggtcaggctggtcttgaactcctgacctcaggtgatccgcccacctcagcctcccaaagtgctgagattacaggtgtg[137 bp omitted]cctctccccgtcaggttcaaacaattctcccgcctc[134 bp omitted]cagcttcccaaagtgctgggattacaggtgtgagccaccatgcccagccatacattttacttttgaacactacataccgtggaatacttttcagactttaaaaggaatgaaatactgatacatgcttcaccgtaggtgaacttggaaaacattgtgcaaaattaaatacgtcagacacaaaaaggcaaaggccgagtgattccacttctaggagattcctagaacagtcaaattcctggacacagaaagtagaacagagcttaccagggactgagagaaaaagggaatggggtgtgattatttaacgggtacggagttttaattgggaaagatgacaaagttctggagatgaatcgtgatgatggttacacagcgatgtggctgtacttaatgccactgaagtgtacactttaaaatggttcacatggaggc[275 bp omitted]caaaaaaaaaaaaaaaaatggttcacatggaaatgtttgtgatgtatattttatcaccgtaaaaaaatgtaactggggtaagtatgatcaatatttggcaatttaagctttatggtagaatttcattactagagtgaagaaagacagtccataaaaaataaattatttaggccggggtgcagtggctcatgcctgtaatcccagcacttcgggaggccgaggcaggtggatcacctgaggttgcgagttcgaggccagcctgaccaacatggagaaaccccgtctctactaaagacacaaaacttagccaggcatggtgacgtgtgcctgtaatcccagctactcgggaggctgaggtgggagaattgcttgaacccgggaggcagaggttgtggtgagctgagattgcgccatcgcactccagcctgggcaacaagagcgaaactccgtctcaaaataaataaataaataaattatttaattgaccagatagggactcccagcccttccttcctggggagctccaggagctggctgggctgggcttaatctttcctcccaaagaaccaaaagaaaaagagatgcacatcaaggtttgctggggaccctcaaaggaaaagaaacgatgtaactcgagtagaggataaacgctttgttcagctgatttgcatcaggggcacctgaagatcaagcgactccccagttaagcagagtcagggtgggaaactgagtctgtgtcctagaggtctgggtttaggcagtcattttgggttttgttttgttttgtttgttttgaaacggagtcttgctctgtcacccaggctggagtgcaatggcgctatctcagctcactgcaacctcctcctcccaggttcaaacgattctcctgcctcagcctcccgagcagctgggattacaggtatgcaccaccatgcccagctcgtttttgtatttttagtagagacagggtttcgccatgttggccttgaactcctcgcctcaggtgatctgcccacctcagcctcccaaggccagaggatcactttaagcccagtgtcaggcctctgagccgaagctcagccattgtaacccctgtgacctacacatatacgtccagatggcctgcaggagccaagaagtctggagcagccgaaaaaccacaaaagaagtgaaacagccagttcctgccttaactgattaacccaccttatgacattccaccattatgacttgttcctgccctgccccaactgatcagtcgaccctgtgacattcttctcctggacaatgagtcccatgatctctccacaatgcaccttgtgagcccctcccctgctgacaacaaataaccacctttaactgtaactttccactgcctaccccagccctataaagctgcccctctcctatctcccttcgctgactctcttttccaactcagcccacttgcacccaagtgaataaacagcctttgttgcttacacaaagcctgtttaggtggtcttctatacggacacgcgtgacacccaggagttcgagacgagtctgggcagcatagtgagttttcatctctaaaaaaaaaaaaaattaaaattagccaggcatgccttgtacgtgcctgtggtcccagctacttgggagactgaagtggtaggatcgcttgaggctgcagtgagccaagattgcgccactgcactccagcctgaaggacagagcaagaacttgtctcagaaaaaaaaaaagaaaaaaagaataagaaaaggaaaaaaataaaaaaggaaggaagggagggagggaggggcagagagggagagaggaaggggggaaggaaggaaagaaagaaagaaagagaaagggagggagagagagaaaggaaagaagggagggagggaagaaagagaaagaaaaaagaaagaagaaagaaagaaagagaagaaagaagggagggaggaagggagggagggagaaaaggaggaagggagagagagaaagaaaaagaagaaagaaagagaaaaaaggaaggaaggagggagggagaggaaaagaaagaaagagaagaaagaaagagaaaaaagggaaagaaagaaaagagaaaaaagagaaagaaagaaagaaagaaagaaaagaaaagaagggccgggcgcggtggctcacgcctgtaatctcagcactttgggaggccgaggcgggcggatcacgaggtcaggagatcgctgaaaccctgtctttactaaaaatacaaaaacttagccagggtggtggcgggcgcctgtagtcccagctactcggaggc[144 bp omitted]aaaaatcatttcaagggtaggcgacgggagccttgcggtttagccgctagtcaacggatgggggggagtggtagcaaaaacataaaaatggggacaagagagaaactggagactccccaacctgtctgtttccgcccttttacagtactgaggggaaaaaaaagccttctttccttgggaaatgcaggaagccagcaagcggccggagtctccggagcccgcaaggaggcgcgttggctgcgcagagagcgcgcttcccagctggagagcctaggaacggtggcgcgggcggaggcgacagcgaggacccaaggctggggtttcctgcttggatcaggagtgcctggggagtaagttctacaggaaatgtcaatctactggtcgtgggggtcagactctggggtcgggtcgatcgggtcccgggggcggggggtgggacgggggtgggcaggcaggagtgcgggcgctgggatcccctgcctgctcggctcccctctcctccccctggtcccttacaccgtccattttgaggaaggggtcaagaagcgagtacaaaatgtctgggcaggacgaatctctgtagtcggtccttcctggcggcctcgttaggttgatttatttcaacagtttgatccccatcctggtgcagctccgagacgctcctgggctgcgcgcgcttttgggctgcgccaccgacagagacatctggaagccggagctagtggaagagtaagtgtgcctgagtgtccgtactaagggcgggaccgggccggggcccagggacttgagagttgctgtctgcaaaagcctcattgtctctacccttccgggaggaaaggggaaggcacgaatgacccacgtgttcagaccccgagcgcgcccttcaccttggcccagggagaagggcgcttcccccataccgtgctgcagcgttgcgaaagcgcctgtccccgggcttgggcagcagagatgcccgcatgcagcggttgcaggggttgtgttctttgcatccatgaaagtattggagctggccgggcgcggtggctcacgcctgtaatcccagcattttcgaaggccgaggtgggcggatcacctgaggtcaggagttcgagaccagcctggccaacatggtgaaacccccatctccactaaaaataccaaaattagctggccgtggtggcatgcgcctgtaatcccagctactcaggaggctgaggcagtagaatcgcttgaacccgggaggtggaggttgcagtgagccgaaatcgagccattgcactccagcctgggcgacagagggagactctgtctcaaaaaaaaaaataaataataataataataataattagccgggcatggtggcgggcgcctgtgatcctagctacacgggaggctgaggcaggagaatcgcttgaacctgggaggtggagattgcagtgagccgagcgcctgtaatcctagctacttgggaggctgaggcaggagaatcgcttctacctgggaggtgaaggttgcagtgagccgagatcgtgccactgcactctagcctgggcgacagagcaagactctctctcaaaaaaaaaaaaaaaaaaaaaaaaagtattggattggagcctgttgtgatgagggtgaactgaaaagtcctgggcagggccagacgtgcaggatgcactggtttcttacgagaaagagctttttttttttttttttttttgagagggagtctcgctctgtcacccaggctggagcgctgtggcgcgatctctgctcactgcaagctccgcctcccgggttcacgccattctcctgcctc[134 bp omitted]ggcctcccaaagggctgggattacaggcgtgagccacagcgcctggccagataaagagctttgagggtttgagttccgtgtgctgaacatggtcttttatgggaactgagacctcagcagaggaaatatataaaaaggacaagctgcaaggagagtggtgtgaaggtgtcaggatcaaaccccacggtcggaacaagatgcatttttatcactaatccgctccggtgaggtctgatttactggaactcagggcaaaggtgggaatgtgtttcatcagccaggtatatcttcgtcatggacaatcaggcaaaagccaacctcagcctgctcacctgagctgactcacaatgatgcgttgtttttctttttcttttcttttctgttttttttttttttaaactactgtcctgagctgatgtgtctgaggttactagggtcagaaccggcgctccaattgtattggggaaaggacggaattcagggaaacttaaattgaaataggcggttttatcttcttaggtaggcttacagctgagatgcgtgtaatggggttatcatcaggtgtggctgtttccttgggaactataaggtcaagatagacgtggaatgttgtgtctcaaaaactcttatttacagctcagcccctgagttgcacaggcttgcttctgtgtcaaagtgacttgga[138 bp omitted]gcctc[134 bp omitted]ggcctcccaaggtgctgggattacaggcgtgagccaccgtgcctggccaatatatatgtatatatatttttatacatgtatatatataaatgcatacacacacacatatatataaatatatacacacatatatttatgtgtgagtgtctatatataaattcagctttttctcatatgattaatttaatttttaaattattaatggtttagaaaagttttgagtccgcaattcattgctgacagtgtcatgtaaacgtttagatttgtcctcaaattgagggaacttgccatcaagtttcttccaaatatcatgtaagttgtagattttatggcattctaacattttatgaacaaatgactcatcttatactatttaagttgaccacagtcattaaacggtcatcagatgtcacatttggagcaggaagagttttgggggtttgtttttgttttgttttaatagaaaaaaacttttatatatatatatatatatatatatttttttttttttttttgagacagagtttttctcttgttatccaggctggagtgcagtggtgcaatctcgtctcaccgcaacctctgccttccaggttcaagtaattctcctgcctcaacctctctagtagctgggattacaggcatgtgccaccatgccgggctaattttgcatttttagtagtgatggggt[146 bp omitted]tgcgtttctcttccagggctcacaccctcgaacttgcctccctttgttcatgacatttactagttggagtccctgggtagtcagaatggcagaacgtccacgcctgtgcatttgtgtggttgttccttgtgtcgttgaaagttagacctggccaggcacggtgactcacgcctgtgatcccagcactttgggaggctgaggtgggaggactgcttgaccccaggaggtcaaggctacagtgagctctgatcacaccactgcactccagccagggcagcagagtgagaccctgtctcaaaaaagaaagaaagagagaaagagagagaggaagagagaaagagagagagaaaaagagagaggaagagagaaagagagagggaaggaaggaagggagggagggagggagggaaaaagagagaggaagggagggagggagggagacagaaacatcctaggttggtcaggcttcgtggctttaatcccagcactttgggaggctgaggcaggatgatcgcctgaggtcaggagttcaagaccagcctggccaacatgatgaagtcctgtctctactaaaacacacacacacacacacacacacacacacacacacacaaaatagccaggcgtggtggtggtcgcctgtactcccagctacttgggaggctaagacaggagaatctcttgaacccagaaagcagaggttgcagtgagccaagctagtgccactgcactccagcctgggtgatagagcgagaccttgtcttgaaacatatataataacaaagaaaaatttaaacaaaataaaaatgaaagatacatcgtaggtggtgtgttcatcacatcagtgtaactataatggctgtttgttgccgggcgcggtggctcactcctgtaatcccagcc[231 bp omitted]tcaaaaaaaaaaaagctataatggctgtttgtccctgtacaagtcaagctaacattggtggggtagtttctggaggtgagagagcctcttacctcttttttttttttttttttttttgagatggagtttcgctcttgttgcccaggctggagtgcagtggtgcaatctcggctcaccgcaacctccgcctcccaggttcaagtgattctcctgcttcagcctcccgagtagctgggattacaggcgtgtgccaccacacccggctaattttgtatttttagtagagacggggtttctccatgttggtcaggctggtctcaaactccctacctcaggtgatctgcctgcctcagcctcccagaatactgggattacagccttaggccactgcacctgcagagccttacctctgaaagttgcattcctttacgcccagcaagtcctgagtgatgcctccgtaccctgctaatgactgcctcccctttctgtgtccaccgacgtgtcttatttcctgaatcagttgttttattaaggttgcaaaatgatgatttttttttgttgagatagggcctcattctgtcacccaagttggagtgcagtagtgcaatcatagttcactgcagcatcaacctcctgggctcaaatgatcttcccaccccacaacctcctgagtagctgagactagaggcgcacgccagcgtgcccacctaatttttaaattttttgtagagatggggcctcgctatgttgcccagggtggtatcaaaatcctgggctcaagtgatcctcctgcctcagcctcccaacatgctgggattataggtgtgaaccacccagcccagcccaaaatggtgatt[222 bp omitted]gctgaggcaggagaattgcttgaacccaggaggtggaagttgcagcgagctgagatcgtgccactgcactccggcctgggcgacagaatgagaccctgtctcaaaaaaaaattttttttaatatatatatttttgttatattagctgggcgtggtggcaggcgcttgtggtcccagctacttgggaagctgaggcaggagaatcacttgaactcaggaggcagaggctgctgtgagccgagatctccccactgcactccaacctggatgacagaatgagaccttgtgtcaaaaaataaaaataaaaaaatgaatatgtagctggaattctgtagttttccgtcatccgtaaggctattccgtttcttttcttattggaaaggcaaagtaaaggcttaatttttcctctttattaaccaaggcttgtgtttttttccccctctggttttctctgtctgggtatcattatgagcgcaggtatttttagtgttcagtgtgtttccatcaattgcaatgattcactttgtagttcaaatccggccgctgggagacgtttccagccgctgtgcatcctcctaacgcggtctagggcagctcccctgccatctggcaccgcaaggctcacactgggaattttctgttcccagatcagccatgtttccgagggtgttcattgcctcctgcttcttaattcttctaagcattttctatgaatagactgaccagggaggcattgggtgtgtgtgtgtgtgtgtgtgtgtgtgtgtgtgtgtgtgttcgtgacgatatgaagccttttcatcttatatttgaaactttttcctcttacact[131 bp omitted]acctcccagattcaagtgattctcctgccttcagcctcccaagtagctgggattacaggtgtgcgccaccacgcccggttaatttttgtatttttagtagagacagggtttcgccatgttggccaggatggtctcaaactcctgacctcaagtgatccacctgcctcggcctcccagagtcttgggattacaggcttgagccaacgcgcccggcccaattcaccttcttaaagggtgcaattcaatggcttttagtatattcacagacgtgtacgtccctcaaatttagaacatttccatcacccctgaaagaagccctgtatccttcagtggtcatctcccagtccctcatctcccccagccctggacaacctctgatctgctttctgtctctatagattcgcctattctggacatttcattttcaatggggtcatacactgtggtcttttgtgtctggcttcgttcactcagcatcctgttttcagagctcactgggttgtagtgtgtgtcagtgcctcagtccgttttatggctgggtaatattccatggtgcggatagaccacgtttgctttctttgttcatgcattgatcagtattgggttgtctctactttgggctgtaatgaataccgctatgggccaggtgcggtgctcacacccctaattccagcactttgggagggcgaggcgggcggatcacttgaggtcaggagttcgagaccagcctggccagcatggcgaaatcccatctctactaaaagtacaaaaaattagccaggtgtgatggcaggcacctgtaatggcatctaatcgggaggctgagacaggagaatcacttgaaccagggaggcggaagctgcagtgagctgagatcgtgctactgcactccagcctgggcaacagagtgagactccgtctcaaaaaaaaaaattgcaattagattagcggctgccagcagctgggtgaaggggagaatgggaagtgactgctaagggggatggggttttattttgcggtgatgaaaagtatttggaactaggtagaggtgacgtttgtacaacattgcaaatgcactaaatgccactgcattgttcacttaaaatggttaacttcatgatatgcaaatttcacctcgattaaaaaaaaatgctgcttgaggccaggaatttgagaccagcctaggcaacatagtgagaccccatctctatgaaaataaatatgaaaaattaggaggcatgggggcccatgcctgtaccttcagctactcaggaggctgaggcaggaggatcacttgagcccagaagtttgaggctgtagtgagccatgattgcactactgcactccagcctgggcaacaggacaagtctctgtctctaaaaaattaaattaaaatataggtgtgtgtgtgggtgtctgtgtggggggcgggggtggggggatgggggtgtgtgggtgtgtgtgtgagtgtgtgtgtgggtggggggatggggtgtgtgggtgggtgggcgtaagggggttggagtgaggggatgggggtgtgtgggtgtgtgggtgggtgggtgtagagggggtgggggttgtgggctgtggtggggaagtgtgtgcacacgtgcatttatatgctgagattaatgtcaggcaggatccacatacgagtgtggggaaggcagggtgcctggattctcatagctccattcttctcccaagctctgcctcacctgcctccttgaaggaaacacggggaagccaggactggccgtcacgttggtgacaaatatgtcccaggtaagttggcagctcaccctctcccagaagcgtgttgtcgttcccacgagtcaatgtgcctctgcctgtggctgggagtcaggtaaagcacatggagccaggcagggccccccgccagccgtgctgccctaggtctctgcacctctgcttggagagagatgctgccctggggattctcctgggaccacccccaccccagtactgactggtcctttccacacctcatcctggctgccagtgggcttcacgttctgctgcaaagcacactaagaaaggagctgaaagtgtctttggtggggtgcagtggctcaagcctgtaattccaggactttgggagggtgagacaggagaatcatttgaggccaggagttcaaaaccagcctgggcaatgtagcaagaccaccgtctctataaatataaaacaaatttgcctggtgtggtggtgcacggctgtcgtcccagctacttaagaggctgaggtgagagaatcgcttgagcccaggaggttgaggccacaatgaggagtgatcactccactgcattccagcctgggtgacagagtaagactgtctctaaaaataataataaagtaaaataaaaagaaagtgtttttgtcttaaggaactcagggtctcacaggggacactaggcgtttatggagcgggcagtggcagcatctcccgcaactgtcatgacctgcagatgacaagcagtggactgagacgtgccccactccaaattttttttttttttttttttttgagacggagtttcactcttgttgcccaggctggagtgcaatggcatgatctcggctcactgcaacctccgccttccaggttcaagtgattctcctgcctcagcatcccgagtagctgggattacaggcacctgccagcacgcccggctaatttttgtatttttagttgagatggggtttct[132 bp omitted]tagtttgttataacagcctgaacaggctaatgcatgagaaagacacacagttggtcaactggtagagattgaagtccggtcgcgtgactcaggtactctttttcctgagacagggccacaggtgatggtgtgtgctggctgtcccagctacttgggaggctgaggtgggaggatcgcttgagcccagcagttcgaagctgccgtgagctgcatttgcaccactgcactccagcctgggtgacagagcaagaccctgtctcagaagaaagagcacctgagtcatacgaccggacgtcagtctctaccaatcgactgtacctcttcctgttgcattaggctgttcaggctgatgaaactatcacagatggggtggcttaaacaacagacattgattttctcacagttctgcaggctggaagtccgagatcaaaatagcggcagagttgcttccttctggaggctccaaaaaagaatttgttccatgctcttacctagctgctggtagtcactggcgtccttggcattccctggcttgtggacccatcactccagtctctgcctccctcaccaaatgacattcttccctctgtttccctccctctgtccacatttccccttctttttttttttttttttttaatttatattttgtttgtttttttgagacagggtcttgctctgttgcccaggctggactgcagtgggaggatcatagcttattgcaacctccacctcccaggctcaggcaatcctccctcctcagcctcccgggtagctgagactacaggcacccgcccacactcacgggtaatttttttattttttgtagacgggttgtcactgtgttgcccaagctggtcttgaactcctggcctcaagcgatcgtcccacctcaacctcccaaagtgctgggattacaggcatacgccactgcagctggccagatttcctcttcttataaggacaccagtcactggattagggcccacccaacccccagtacaacctcatcttttttttttttttttttttttgagacagtctcactttgtagcccaggctggagtgcagtggtgtgatctcggctcactgcaacctccacctcccaggttcaagcagttctctgcctcagc[135 bp omitted]gcctcccaaagtgctgggattacaggtgtgagccaccgcgcccggccacaacctcatcttaattcattgacatctgcaaagactctagttcacaaatcaggtcacctttgcaggtaccaagggttaagacctcaacctacctttttctgtggagaaaggggtcacagttcaaactgataacaggacacccctccgagccaaactgcatgtgttattttaggactcggtgaccttcgcagacgtggctgtgaacttcaccaaagaggagtggaccctgctggacccagctcagaggaatctctacagagacgtgatgctggaaaattctaggaacttggcattcataggtaaggaggcccccttcctgcacttagtccgtgatgggaccagtgctggtttggaaccgtgttctgggaagtgcattggaaaatgggaactgggttaaattccagagacacagctgctgccccccaggtagtaggtgtagggttcaccatgaaactggaagtcagtttgttgcattactttatttattttattttatattttattttattttattttattttatttattttttgagacagggtctcactctatctcccaggctggagtgcagcggcatcatctcagctcactgcaacttccaccccccaggttcatgcaattcttctgccttagcctccctagtagctgggaatacaggtgcacaccaccacacctggctaatttttgtttgtatttttagtagaggcagatttcaccacgttggctaggcttgtcttgaactcctgacctcaagtgatcctcccacctcggcctccggaagtgctgggattacaggcgtgagccaccacacccagcctttatttttcttttcattaagatggggtctcaccctgtcacccaggctggagtgaagtggcaccatctcggctcactgcaacttccgcctcctgggctcaagcaattctcctgcctcagcctcctgagtatctgggattacaggcatgctctaccacccccagctaatgcattacatttttattctcttcgtgattgaacagaatttgggggatccttatgtaggtgaacatggtgcacaggaaaagggtcgttttgagcccttttggcagagttttagtgcattgatgagaaaagtagagggaccactgttgcacttctattcacacatcatcagcttcagaaccccagcaaaccaaagcctgtgtccatttgacagaaagtctcggcacagttcctttataccacatgcttgcccagtgagcaggatttcaactaggcaaacccagtctgccctctcatttggagcaagaagtggtctgaaaacagtgcagggcagttttgtccaggcatttatgcatctcagtaccaggtagatgtgaacattacaggaccaacaggtttgtaagccagcagcatggtaacagagcaacaggctcgccactgagacagcagggtttgcaacagagaaaagagaaagttgcatgattacatggtgccaaccgaggagatgggaggagacgctcaaattcttctccctggggggttctggggtttttgttttttttttgtttttgagactgtgtttcactcttgttgcccaggctggagtgcagtggcgcgatctcggctcactgcaacctccacctcccgggttcaagcaattcttctgcctc[132 bp omitted]ctcggcctcccaaagtgttggcattacaggcatgagccactgctctcatttttaaggggatcatggaggataagggactggagaattggagacgttgattggtcagaggaagggggatgaaatcatcgggatgaggaaagtacattctttggtgcgtcagtttctcacggcattcctcagatcagtgagcatagtcatttcatcagaatgcaggacctgaaggaatatctcaaagagaaaacttaatgttttataattttcaagttgttatctacagagcagctaaggagacctataggccaggcacagtggctcacacctgtaatcctagcactttgggaggctgaggcaggaggaggattacttgaggccaggaagtcgagaccagcccagccaacatggcaaaacactgttctttttgtctttaaaaacaatttttttttaattaaaaggaaaaaaaaagaaagaaaaaaacaggcactctgttgcccaggctggagtgcagtggctcagtctcagctcactgcaatctctgcctgccggattcaagtgattctcctgcctcagccccctgagtagctgggattacaggcacacgccaccatgcccagctaatttttctatttttagtagagacggggcttcaccacattggccaggctggtctcaaacgcctgacctctggtgatccacccacttcagcctctcaaagtgctgggattacaggcgtgagccactgtgcctgtccaagcttatgttttttgacttttatccatcctctcatattttcatttttccctgctaaaggcctgttccttttctccttaaaattgcacatggagccagctactcgggagactgaggcaagaggatcacttgatcccaagagctcaaggctgcagtgtgctgtgatcacacctatgaatagccagccactgcactccagcacctgggcaacctagtgacaccctcatctcaaaaaaataaaaatttcacatggactctctgtccaattctcttccacttagaattcctgatcgtttccttgatctctgcagaactgttcctcagtaacatgacactctccatgttgaacccctgaccttaccgtcatcacattcctgacactgcagaatctctgatgtctttctctgcttccttcctcttgctttcttccccttcacatttttatcatacatgttgagtgaacatttagaaagaaatccacacagaggcctggcgcgttggctcatgcctgtaatcccagcactttgggaggctgaggcaggtggatcacatgaggccaggaattcaagaccagcctggccaacatggtgaaaccccatctcaactgaaaacacaaaaattagccaggcatggtggcacgcacctgtaatctcagctactcaggaagctgaggccagagaattgcttgaacctgggaggcggaggttgtaatgagccaagatcatgccactgcactccagcctgggccacagagtaagactctgtctaaagaaaagagagaaagacagagagaacgagagagagagagaggaaagaaggaaggaaggaaggaggaaggaaggaagggaaagaaagagaaaagaaagaaaggaaggaaggaaggaagaaagaaaggatggaaggagcgagggagggagggaaagaaagaaagaaagaaagagagaaatccacacggagattgcctatgtcatcatctctaacccacctttactttcaacaaagaatttaacttttgtgccactgtatttcagattgggcaactccatgtaaaaccaaagacgcaacccctcagccggatattcttcctaaaagaacatttcctgaagccaacagagtgtgtctcacgagcatcagttcccagcactccacattaagagaagactggagatgccccaaaacagaggaaccacacaggcagggggtgaataatgtgaagccacctgcagttgcccctgagaaagatgaatctcctgttagcatttgtgaagatcatgaaatgaggaaccactctaaacctacctgcaggcttgtgccttcacagggagattccataagacaatgtatcctaacacgtgactcaagtattttcaagtataatcctgtcttaaacgatagtcaaaaaacacatgaaaacaacgaagacgatggagtcttggggtggaacattcagtgggttccgtgtgggagaaaaacagagctgaaatcaagcacatggactggcagtcagaacactgtgcatcatatacgtgatgaaattgatacgggggccaacaggcaccagcggaatccatttggaaaagctttccgtgaagacggatcccttagggcacacaacactcatggtcgagagaaaatgtatgattttactcagtgcgagaacacctccagaaataactcaattcacgccatgcagatgcagttgtataccgcagagacaaacaagaaggattgtcaaactggggcaacctctgccaacgctccaaattccggttcacacaagagtcattgcactggagagaaaacccataaatgccccgaatgtgggagagcctttttttatcagtcattccttatgagacatatgaaaattcacactggagagaaaccgtatgaatgtgggaaatgtgggaaagcctttagatattccttacaccttaataaacatttaagaaagcatgttgtgcagaagaagccctacgaatgtgaagaatgtgggaaagtcattcgggagtcctcaaaatatacacatataaggagccacactggagagaaaccctataaatgtaagacatgtggaaaagactttgcaaagtcgtcaggacttaaaaaacatcttaagactcacaaagatgagaagccctgtgaatgaaaggaaggtggaaaatttttcattaattttctgactgtaccaaacatgtgaggaggacatattggaagggagctcaaggggttagcatgagtgagaacatcttccctgaactctcgtatcttacagaaatgtgaaaaaaaaccctgtgaaggtaaagtctacagaaagcctttcatcttcattcatcttgagtagacatttgttctcaccctggagagaaactgcgaatctaaaaggaatatgacaaagccttcagcgtggtctcaaattcatggttcatacaagaactcacactgcagagactc[136 bp omitted]cccgtctctactaaaaatacaaaaaaaattagccaggcgtggtggcaggtgcctgtagtcccagctacttgggaggctgaggtaggagaatggtgtaaacctgggaggtggagcttgcagtgagccgagatggagccactgcactccagcctgggggaaagagcgagactccgtctcaaaaaaaaaaaaaagtaggaaagacctctttaaacacttaccactcatgttgcatgtgaatccacatcctgaagggaggctacaactggaataaaaataagaaagctttcaaggcctggtgcagtgactcacacctgtaatcctagcactttgggagtccaaggtgggggattgcttgagtccaggagtttgagaccagcctgggcaacatggagaaaccccatctctacaaaaaaaaaaaaaaaaatgcaaaaattaaccaggagtggtagcacatgcctgtagtcccagctacctggggagctgaggcaggaggatcgcttgagcctgggagcttgaggcagcagtgagctgtgtttgcaccactgcactccaccctgggtgacaaagtgacaccctgtctcaaaaaaaaaaagaaagctttcaggtccagcctttcacttaggcacaatgagcgcacagtaggactgaaacactgtaaatgttcatgattttccagtttttcctttctaaaaaaaaaaatgctacaagatgaaggatatccctctttgcacactcccagctctgccacataaatgttggtatatagcaggttcattataactcacatacacgtggtctcattttcaatgtgaagccttctttgagcctcattcaatttagacttgggattcatatactccatgataccatttttgtcttattggtcactgttcaactgcattatggtcagagtatgtggtctttctggtaccaacttgggttacttgttatgactttgtcagtctaatgtgccctattctgtcaacttccctgccacctccattcttctcatcttctttactaagggcacatagattcactttccacaatgagcactatttaatgtcttatttttatttttattttatttatgtatgtatttattttgagacagagtcttgctctgtcacccaggctggagagcagtggggcaatctcgacttactgcaacctctgcctcctgggctcaagtgattctcctgcctcaccctcccgagtagctgggattacagacacccaccaccacgcccagctaatttttctatttttagtagagacgagatttcaccacgctggccaggctggtctcaaactcctgacctcaagtgacctgcctgccttggcctcccaaagtgctgggattacaggcataagccactgtgcccggcctcttttcaatcttttaaaagttgggaaacggccgggcatgttggctcatgcctgtcaccccagcactttgggaggccaaggtgggcggatcgcctgaggtgaggagttcgagaccagcctgaccaacatggagaaaccccatctctactaaaaatataaaattagccaggtgtggtggctcacgcctgtaatcccaactactcaggaggctgaggcaggagaattgcttgcatctgggaggcggaggttgcggtgagccgagattgtgccattgcactccagcctgggcaacaagagtgaaacttatctcaaaaaaagtaaaaataaaaataataaaaaataaaagttgggaaatatgactacctgaaaatgcatgaaaatgtacatatacattttttttttcgagatggagttttgttcttgttgcccaagctggagtgcagtggcgtgatctccgcttactgcaacctctgcctcccaggttcaagtgattctcctgcctcagcctcctgagtagctgagattacaggcacctgccaccacgacatttcaaagttaataaagtgatcacccttatacccaccatccaagcccgtaaacagctcatcattaaacaccaggcaattcacgtctgtgcctcacagacgacatctccagccccaagaggaaaccgccatggttcattttgtatcattcgcccccctcgctcatctttatgtttgcagctatgcagaaatccccaaataccctgttttctagtttcgatgatgtttatgctgcgtatgatggcatggcatagaatatttctttgtgccttgcttctttcaggaaaagaaaagctaagcaggtagggtgcaggtggcattcattctttcttagttatattcattccagagaccctggatctgtatctcactttagagattataaacatgctgctaacaccaatttt[222 bp omitted]gaggcaggagaattatttgagcccaagaggcggaggttgcagtgagccgagatcgtgccactgcactccagcctgggcaacagacagagtgagactctgtctcaaaaaaaaaaaaaataggccgggcgcggtggctcatgcctgtaatcccagcactttgggaggccggggtgggtggatcacttgaggtcaggagttcgggaccagcctggccaacatggcgaaaccccatctctactaaaaatacaaaacttagccaggcatggtgcagacatctgtaatcccagctacttgggaggctgaggcaggagaatcacttgaacaagggaggcagcggttgcagtgagctgagactgcgccactgcactcccgtctgggcgacggagcgagatttcgtctccaaaaaaaaaggaaaagaaaagagaaacgccactggtaagagcagaggtcctcctaggcgcgcattctgcatggccccagcactgttaagttcagctttcagtgtttggggaagacctgcaggtcagggacccccactgtggctgagggggctcaagcttggccctttctcccggacccctgctgcctgcgtttcccagcaatctgctgctttatcctagaatctgggtgactcatggccctccccatcctggaaggaatgaagaggaggaggggaggctgctatgccaggacagtcccagaccttgccaaggggcctgggtccactcccacccccagggagcgctgtgcggaggaaaaggaccatggctgaaatcagaatccctggattcaaccgggggtggagggggccggggcgggaggggggaaacatctgtagctgagggaacacccctcccgcctccagtcgctgaggctgaacttagccgactttggggattccccaccctctacccccaactggtcctcaattctcacagatgtaaactgagaattttcaacaatcgttttggcaaacatacgccaggcccccttctgagcgctttgcacctattaactcatgcaacgcctgcaacgctatgaagtggctgctgttatcactaccattttacagtggggggaactgaggcacagcgaggccaagcacgatgcccaagatcacacagccagcaggtggccgggaggggctcgaccccgtgctgtcaggcaccagagactcggctcttcagccccaggccagagcctccctgcactgacggggtcgcgaattcgggcaggagggttcgtgtgtgtcctcacctctgggacgcgagctccggggacgggggacctcgtctggcgtgggaggcatttagtgagcgccgtggactgaagccgggacggtcttaggagaaccacttcccttcttggccgcctgaaaccccctacagggttctgcttctggaactgcattcgaggtcagagtttctagtacgagtaaagcggatcctcgggaagagacccgaccagaaggaaatcgccgtcttggaagatctaagtccgggatggaacaaaacccactccgggcggggggagcgcgccacctggcggcggatcctgctaaggcagcgccgcccggagaccagaaacgttggatttgggcagtgggccgaggtggttggaattggcgaatgggcagttgtctgaaaatcattgtgtgaaactaaggactgtctaccagtggcttccaaaattctgacgcacagtaagaaatcattttgcgtcagcatttttttttttttttttttgagacaaggtcttgctctgttgcccaggttggaatgcagtggcacgatctcggctcactgcaaactccacttccagggttcaagcgattctcctgcctcagcctcctgagtagctgagattacaggcgcccgtcaccgcgcctggctaattttttatttttagtagagatggggttttacaatgttagccaggctggtctcgaattcctggcctcaagtgatctgcccgcctcggcctcccaaagtgctgggattgcaggcatgagccaccgtgcctggccgcatcagcatacttttacaaaagaataccaccctctatagccaacaacaatggattgtatacttcaaaatagctagaacattttgcatgtttcaccgcaaagaaatggcaagcatctgggatgatggatttgctaataaccttgatttgatcactgcacaatttatatatgtatcaaaacatcacgccgcatcct[132 bp omitted]aaaccccatctctacttaaaaaaaaaaaaaaaaaaaaatttgctaggtatggtggcgggcacctgtaatcccagctactagggaggctgaggcaaagaactactttaacccgggaggcagaggttacagtgagccgagatcgcgccactgcactccagcctgggtgacagggcgagactccgtctcaaaaaaaagaaaattttagttttaaaaataccaccctgtattacacggccctgtattacacgatgctttatattccactctattccttttttttttttgagacagagtgtcactctatcacccaggcatgatctcggctcactgcaacctctgtcccccaggttcaagcaatcctcctgcctcagcctccctcagcctcctgagtagctgggattacaggctcccgccatcatgcccagctaatttttgcatttttagtaaagacggggtttcaccatgttggccaggctggtctcgaactcctgtcctcaggtgatccgcctgcctcagccccccaaggtgctgtgattacaggcatgagccaccaggcccggcctattcctatttttaaatgctggtcaggtcaccttaaaatggtttcctgactctctaagggtctgggatagggttttccactgttctagattatccccatgttttttcacttgacagagattatgatgaggaaccggttacacccacgctacctcccagtgagccttccccaccacacaaagctgcctccaggattcgctgccagctctgatgtcaggatgagtaacagctcaggatgctgaagacactggcccaagaccacacagcctggatgtggcagtgcctgtttctgcctcactcctggaggaggaaaatgattaaatacccgtaatttcactgctattgagtacaatttaattcatccttcctccactttggctgataagattgagctgcactcacctgctgttctcttaggctgtagcataaggcattccagaggtcaaactttaaaatgtctttttcactttgggaggccaaggcgggaggatcactggaggccaggagttcgagaccagcctggccaacatggtgaaacctccatctctacaaaaaatacaaaaattagccgggcgtggtggcacacatctgtagtcccagctgctcaggaggctgaggcatgagaatcacttgaacctgggaggtggaggctggagtgagccaagattgcaccactgcactccagcctgggcaacagagcaagaccctgtctcaaaaaaataaaaaatcaaaaatctaggttgaattctcaggtgtctctaaagtggccttcgatgtattctgcgctgggtgctgcagggttgaccatctaaaagtggcgagcccagccccagtccaggggaaggtagaggaagtgaacctgctcattgtaggactaggacccttgaggtgacagagagctgtggttagcctgagtccatcgcactgtggtggtctatgaggccgctttgcaggggcagcaaatcagaaggctcggtctgctgtgcttactctgctatctttggaaggaaagaggaggaaatcgctccgaaatgggagatagggctggtggtcacgactcagctccacaccaagatgagacttcctgggcccccagggaggaagaatagcagttccactgccaggagccacgcctcagaggagctgcctttccacctccctcctgaaatgccattttcaaatttctcctttactcttccatccccagaacctagtacaatatatggcacatagtacatgctcaataaatatttatcaaattaatgagaaaagatatgtggatgtcccctcctgtgcagctgtaaggggagaaatagagttctttttttttttttttaactttcctacaccagttttatttaaaacacaaaaataagtatttctctttctgtaaggaaaaatggctcaaatattgctgaacacaggccagactcagtggctcacgcctgtattcccagcactttgggaggtcgaggtaggagcacacttgaggtcaggggttcgagaccagcctggccaacacggtgaaacccccatctcaaatacaaaaaaaaaaaattagccaggcatggtggcaggtgcctgtaatcccagctacttgggaggctgaggca[137 bp omitted]tcctttccatctttatcgctgtcctgctaatagtcacatgtagttctgagcatttactacttgccaggtactgttctgaggctttctgtgtatcagttcattttattctcacacaaacaagtatgtactattatcaagccattttatttattaatttatttattttctgagatacagcttcactcttgtctcccaggctggagtgcagtgtcatggtctcggctccctgcaacctccgcctcccaggttcaagagattctcctgcctc[223 bp omitted]cacaaaaaagtatgcactatgatcaagccattttaaggggaggctcagggtgctacctggattaggaaggtggatgatagattatctgtttggatttgaacttttttttttttttgagacactctcactctattaaccaggctggagtgcagtaccatgatctcggctcactgcaacctccgcttcccagattcaagcaattcttgtgcctcagcctcccgagtagttgggaagacaggtgcacatcaccatgctctgctaatttttgtatttttagtcgagacagggtttc[142 bp omitted]attaaattttgacagggcatttggcatgactcaactacaggaaagagttatcaaggtgttctaagccctctcactcctacacccacccccgctgcaggaaagggccaaagtcagctttttctctgtgaccctgtggctggagttagggctgtccataaataatccttcctttctctccttccaggcacatgaaaagactgcgcttcccggcgaccctttgaagttcggcgtaacctgctgacccgctctggctgagtgtgagctaagaggacaggtgtcatatcaggtccaagcctcgagagtcactgcctgctgtgccatcctctcttcttcccgtgccaaaggactggcagcactccagtgatggctgtgccatgggcccggggtacacgagtgatatggagcggagcgctcagctggcccacaaaggagagaaaactctgctgcctgaggaccacagagaatctgcagctgtgactgcagcacagcccagcctgccctgaccaacatag[131 bp omitted]agcctggccaacatggtgaaaccccatctcgactaaaaatacaaaaattagccgggcgtggtagtgggcacctgtaatcccagctactcgggaggctgaggcaggagaatcacttgaacccaggaggcggaggttgcagtgagccgagaacgtgacactgtactccagcctgggcaacaagagggaaacttcatctcaataaataaataaataaataaataaataaataagaacgctgaatgagtgagtgaatgaatgaatgaatgaatgaatggcagggaatcgggacagggtcacagattacccccaggctggaggtagaggaagcagccatggctgaagccagctctccacacatatactttatttccacagtcccattttcccatgctgaacctggcgtcttcgccctgacttttcccacacctgtcagcactggggggctcttggggagtaaggagctacagagacagggacacaggatgcgtggagagcctgggagatggagatgaggagagagagccggaaacaggaggtgggggatccacagggggccagggctcagcagacagggaaggggcagatatggagacaagacggacagacactgaccaggaagcccagagaacaggagatcaggagtcagagggaaaagcagtgtcaggagcagagagaaaggaaccgggagacacaggtgaggcggtgatgaagggcagatgaaaacagttgaaggggcaaaaagacagaggcctgccactgggagaaaaagacagagacccacaaggcaaacaggggaagtagagacacaaaaaaagaccccacagagagccagggcagggtgggggctgcgtgcccctcgtgttagccccgggagtctttgctggtggaggagcccgggccagtgctggaggcagggccggtgctggagacgtggtctctgctggacccgaggcctccgctcgaatcagacgctgtgcctccgctctccacaccaccctctgtgttttctccgcccctgctggaccccacgtatccagtggagcccaggtagctgctggcgctgacgggtctgaaggtcacgtggcccccactcgaggcactggtggagccgaaggtcacgtggccagtgttggggtcaccgtgcgtgatgtggctgggcaaatgcccagtgctggagctgaggccgccaaaagtgacgtggccaagagagccacggtctctgctagtcttgtggctcaaaatggacccggggatggcatgggggtgcctggtgggcaccaggacggtactggagccggccctctgggtgctggccaggtccacgctcagggtgccgtccagcttcgcggcggcggcggccaggtccttctggcgctgcgcctccgcctgctcctggagctccacctgcagggaaggtgaactgggccccgacacacactgaggcctggccccacccccgcaggccccactctcaccagcttctccacttggctcagcagctcctccctgctcatggggtagtcatcgctggcctcaaaacccggggggtcttctctggggaggggaaggaaaattggaaaagactagacctcagccctcaaaaaggccagcggcccttcctgctaaaccccgggagcctcagccattctcccaccagccccgagtgcccttcccttctggggcacccggggccccatcctcccacacaggtgccaagcccctactccttctggctgcctcgaagcacatacttcatattctaaccccccagggccacatccgccagccagtccccaaaagccccccaaaactctctatcctgtgtgttccctctgcccccatggaagccccgtcccctctgcgtccctcctgccctgcgcctcacagagtgtcagggggctgaagtggggccatcttcttcggaaggtcctccaggctctggcccagcactaggagggcagcgtcggccagggaggtgaagctctggagagtgtgggagcctgcggtcagctgggccacccccgagaccggcctcctgtcccggctccctgccgtctcccacctgggcatgtaggaaggcctgcactgtcaggagctccaccagccgcttctcaatgaggctcaggaagaggcccatgtcccggtctcccatgctggtcttgaccccaaggaggtcatcgatcatgctgctgtcgcaatgggccttggtgaagaggagctggatatctgcgtcatggagggccggttgtcagggatctggcaccgccagctgggtgccagccctctccccactcaggtcctcactgccccattctacagagactgcggtcaaggctcagagaccaaaagggagtcacccgagctcagccagccaggcagggggacggcactgctgtgcatccctctctccctgacttgtccttcaaagtcagcctcaagtgtcactgcctccaggaagccttcccagtgaccccagcagagccagcctcatgagtgtgagatccaggcagtggtgaggggcctgcacttggcttgacacgctgctgctcttcctatcttgaaaatctcagcaattttttaacaaggggcccctcattctgcactgggccccacaaattatggtcttgcaccccagactgagttagggccttctctcgcccccagtgcctgggcgtcctctgtcctagcccctgagtgatgagtgcccagtgcgcaggtcagtcccctccagggcctctccccactgtgcccacatcacctagcacagggctcggatcagccatcacgacagcaggaaggaggacctgcccatatctgagctcctacggtatgccccgaggaggctctccagctcgctccccaccaccccccacctttctctccatccgtcatcccttctaattctcatgacaaccctgcaaagtaggcactgccatccccattcccagagcggaaggaggaagccacacaccaaggttcacaattggtggagctgagattcaaacccaggacaggctgggtgcagtggctcacgcctgtaatccagcactttgggaagccaaggcaggcagatcatttgaggtcaggagtttgagaccagcctggccaccatggtgaaaccctgtctctactaaaaatacaaaaaaactagccgggcatggtagtgcaggcctgtaatcccagttactggagaggctgaggcaggagaattgcttgaacccgggagatggacgttgcagtaagcccagatcacaccactgctctccagcctggctgacagcgtgagattccatctcaaaaaaacaaataaaagctaacaataaatgttttaaaaaagagaaaagaaacaggacagcctgactcctgagtgctctgcatggctacttcctgaaaaataagaaagatgaggcccggcgcagtggctcacacctgtaatcccagcactttgggaagccaaggcgggtggatcacctcaagtcaggagtttgagaccagcctgaccaacatggcaaaacccccctccactaaaaatacaaaaattagctgggtgtggtggtgtgtgcctgtaatcccagctactgggaggctgaggcaggagaatcgcttgaaccaggagggggagattgcagtgagccgagatcgtgccactgcactccaacctggggaacagagcgagactttctcaaattttaaaaaataataataataatagaaaaaaaggatgcacaggtggatgcaacatacccacagaagggattaaaaaaaaaaaaaagaaactcagccaggagtggtggctcatgcctataatcccagcactttgggagtccaagacaggaggatcacttgagtccaggagttcaagactagcctggacaacatagtaaaatcctatctctaaaaaaaaaaagggccgggcacagtggctcatgcatatgtaatcccagcactttgggatactgaggcgggcagatcacctgaggtcaggagtttgagaccagcctgccaacatggcgaaaccccgtctctactaaaaataccaaaattagttgggcgtggtggcgggcacctgtaatcccagcaactcaggaggctgaggcagaactgcttgaacctgggtggcagaggttgcagtgagccgagattgtgccactgcactccagcctgggcaaaagagcgaaattcctctcaaaaaataaataaatgaaaaaaatctaaaaaaatttttaaaaaggaaactctagacccctacctcataccataatgcaaatcaatttgtcataagtcacagacttcaatgtgggagttcaaacaatgaaacttctaggagaaaacacagcataatgcctttgtaacctcaggacaggcaaaaatttcttaggcaggccacaaagtcattaactacaaaaagaaaatttcataaattagatatcctcaaaactaagaaacttcagttcatcaccaaaaaaaatgaaaaggcaagctacagtataagagaaaatatttaccaaaagtctagtatctagaatatacaaagaactccttcaactcagttatagcaagacaaacccaatttttaaaaaaacaagtgcacaagattgaacaggaactttacaaaaacatctgaatggccaatacgatgctcaatattattagtcaccagggaaatgccaattaaattaatagagagagtacg[143 bp omitted]cccgactctactaaaaatacaaaaattagctgggcgtggtggcgcacacctgtagtcccagctactggagaggctgaggcaggagaatcgcttgaacccaggaagcggaggttgcagtgagccgagatcatgccattgcactccagcctggtgacagagcaagactgcatctcaaaaacaaaacaagataaaaaatggctgacactaggaagtggtggaaaaggtgtggatcatcggggactcccatatgctcgcataggtgagagcataaaatcttgcgaccagtgtggaaaactgttcggcattttctaataaatatcaacatatacctaccctaagacccatcggtcccactgctaggcatttatagacagagatgtacatggatgatccatggatgaatactgggtagatggatggatgggtggatgatggatatgggacagttggagggacagcatctgttttttagtgttttgtgaaacaagtggaataatgcataagtgccttgcacagtgaatgacacataataaacattgctattatattttatcatcattttctttacaaataataacatttttggtaactaagactaagaagaaatttggtaactaagactaagaagaaatttggtaactaagactaagactaggaagacaaaagtcaaatgtcattgcagatagatggatgaacagatggatgtggggctgttggaggcagatggacagatagacaatggatggattgatggacatgggacagatggagggatagaccctggatggatggatggacatgggacagttggagggatagaccctgcatggatggatggacatgggacagttggaggaatagatcctggatggatggatggatggatggatggatggatggatggatggatggatatacggacagatggatataggacagatgaaggggtagatcctggatggatagatatgggacagatgaaggaatagaccctggatagatagatggatatgggacagatggaggtatagaacctggatggagagatagatataggacagatgaaggaatagatcctggatgaatgatggatacaggacagttggaggaatagaccctggatggatggatggatgggtggatgaatggatggatggatggatgaatggatggatggatataggacagatggaggggtaggtcctggatgggtagatagatatagaacagatgaaggaacagaccctggatagatagatggatatgggacagaatggagggatagaccctggatggagagatagatataggacagatgaaggaatagatcctgaatggatgatggatataggacagttgaagggatagactctgaatggatggatggatataggataattggagagacagacgttgaatggatggatggatggatggatggatggatggatggatggatggatatgggacagttggagggatcaaccctagatggatggatggatgcattgatagatggatggatggatgggtgtaggacagttggagggacagatgatggatggatagatggacatgggacagttggagggatagaccctggttggaaagatggacagatatggggcaactgataagcaagtgaaccaggttgtccatgcaatgcctccaagccccgcgggctgatggtgtccttccaagtggagaagccaggctcgggagggggcgcccatgggtgctcaccagccttgagcttctccagctgtccccgcacatcctggaagcgggcctcaaggcgctcagcctccgagtgcaccttgtccatgcgctgctgcaacaccttctgctgctgctcctgcagcaaatgctggtcatccttgctggcacgtgcgctcaccaaagcctcctgcatctgtggggacagggctgaatgctgggccagatggcagcctcgggagttgggggtgtggagctaggaagaagcaggaggcaggctgagggagggaagggggcggggaggccgggaggagaggaggagatggagagggcaggcctcactcacctccttgatctcttcctgcacatgctccagctccaagttctgctcgttgatgaagttgaactcagcaaagttgcgctcctcgactgggagagttgggcaaggcggggcccagagagagggagacagagaaacagagacagagagaacagagacagagaggcatacagaaggccaaagaaagtgaagatgaggaaggccacacagaaaccaaggcagagagacgaacagagaggagtcacagagacaaagaggtgtgggaagatacggcaggtgggacacagaaatacacagcaaggcagagagggaaagccagagactcggcaatagcaagggagatggggagatgcaggcggggagaacggtagatatgggtaaggagagaaacagagagggacagggttgagggaaggatgtggagagtgaccccaggcccaggagttaggagggggtggggaggggcagagacagggccacggtaagacgccagtggacgcgggcggcgggtcccaggcatgacgccttgttcctccagcacagatggaggagttccccagggccagagctgaggccagcctgcactggactcagggggtgccggggtcccgggcctcctccctccacccagggccccactcactctccagatacttctgcaccaacaggtcagggtcactctcccccatcagctgggacagtttattcagggcgtcctcgtagcaaagcaccagcctctcctgggaggtcttccagacgccctcggccacctccccggctaggggaagagagaacagcaggtcggcctcctgggtggcctccaacacagagacctcctgggtgagggggagcgaagtgtggtcccacctggggcacgaaggtgtgctgcaggtgccccaggggcggccaggcccttgagatgcaaaggcagcagccccagcctcaccctgcttttcacgcttctccaggacatcgggatccggctgccggtcgttgttcttgagcttgaggaagtggtgcagctgctccaggtgcaagatctgccgctgcaggacctgcgcctccatctcgctctgggcctcctctttctccgcgcgctcccgcagcaagcccatcttggccttcgcctcctccctgcgggggtcagccggggtcaggatgactggaggctggactggggtcggcctggggtcctggggatgggcggggtcagccagaggttgtggggggtgaggtggagtcagctggtgtcccagatgggcagggccagcctggggtcacaggaatggggctgaatcaggttgcagttatcctgtggtcacaaaaagcagagaactggctgggcacggtggctcaggctgtaatcccagcactttgggaggcaggaggatcacctgcagtcaggagtttgaaaccagcctggccaacatggtgaaactccatctctactaaaaatacaaaaattagccagacctggtggtgcatgcctgtaatcccaactacttgggaggctgaggcaagagaatcgcttgaacctgggaggtgaagattgcagtgagctgagatcgcaccactgcactccagcctgggtggcaagagcgaaactgtctcaaaaaaaaaaaaaagacagaagcaagaacttcaaaagagtgcgacatcatattagaaacacaacacaaaactctcggtgtgctgctggctcacgttctttcagcagcctgctctcctcatccttcagagtgtactgtctctctctaggtaaactctctgttctctatttgccttcagtaaattctctttgttggctaaatcagtctcttggcagaattctttctcccaagtaagactaaaaagcgaggattcctgtacttcccggtggcaggtagttttccttttggagtgatggaaatatttcagatctagacagaagtggtgcggttgcacggccccgtgaatgtactaaatgctgctacattctacgctttaaaatggtgaattttgccacgtttgttttaacagagagagagaaagagagaaatcacagagaccctaaggccgacccaggccacagctgatgtcgatcagggaccatgagaaaacagaagccagagaagaacttagtagaaggtaagaaagcatttggagcaaaagaagagggcgaagctgagaaagagacagggatggagtgagagagagagcatggagctcatgagagccccagagagggagagagaagccaacacctaaagcagcttcagctcctcaactccttacagtgtgcctctatctgaaggtggcccgagaggatctctgtcccttgcaaccaatgctgacgaataacaaattcgccagatgcttccaggaaccctgctgcactatatatgtgctagatgcgctttttttttttttttctcctgagacggagtctcactctgttgcccaggctggaatgcagtggtgcaatctcggctcactgcaacctccgcccccagggctcaagcaatcctcccacctcagcctcccaagtagctgggaccacagacacccgccaccatgcccagctaagtttttatatttttggtagagatgggatttcaccatgttggccaggctggtctcgaactcctgagctcaagcaatctgcctgccttggcctcccaaagtgttgggattacaggcgtgagccacctcgcccagccagtagatacattcttatgtgctagatggggtcagtagaggttaatttacatgcccaagaaaaagaacagggccggtggggtgcaatggctcatgcctgtaatcccagcactttgggaggcagaggcgggtagatcatgagctcaggagttcaagaccagcctggtcaagatggtgaaaccccatctctactaaaaatacaaaaattagccagccacggtgccgggcacctgtaatcccagctactcgggaggctgaggcaggagaattgtttgaacctgggaggtagaggttgcagtgagccaagatagcgcaactgcactgtagcctgggcgacagagccagactctgtctcaaaaaaaaagacagaacaggaccttgccagtggaggtggggaactggtggcggggagagagaaaaaggggatattatgggagaaaaaataggttctgacgtgtttcatgagtcctgaaccttcccatcactgccttatggaaaggtgcgtcctgagtcatctgggtcccgccatcccaggatacccgcagtctctacctgacggcgtaggcagaggtggaggagaggataagggtgctgaccaggtgatgcaggtggtggatctcctgtggggggaggagaaaaaaatcagtgccacttcttacaaccccattgctcgaagtctttccttttggccccgtgcttctccaataaggagtaaagctcttgagccttccaaatgtggaccctcctcattagcgactgcccatgaaagggattttaaagaggtgtgaagtcaaattgataagctggatcaaaaggctctttctgtagataagcagaaactaagaaaatatttagtaacctacggggactgggtggaaatgaggtggaggagatggagaggaaatgacgtttccctaggagaccttttggaatagtttgatttgagaaccttgttaatgttttacatattcataaaggaaattaaatcaataaagagaggagagaaaactaaaactgaatgcaaatggaagcaagtgaactttatttaaaaataataatagggccaggtgcggtggctcaggcccataatcccagcagtttgggaggacgaggcgggcagatcacctgagcttgggagttcgagaccagcctggccaacatagagaaactccatctctattaaaaatacaaaattagggccaggcgcggtggctcacgactgtaatcccagcactttgggaggccaagacgggaggatcacctgaggtcgggagtttgagaccagcctgaccaacatggagaaaccctgtctctactaaaaatacaaaaaattaaccaggcgtggtggtgcatgcctgtaatcccagctacttgggacaatgaggcagaagaatagcttgaatccgggaggcggaggttgtggtgagccgagatcgtgccattgcaccctagcctgggcaacaagagtgagactccatctcaaaagaaaaaaaaaaagaaagaaagaaagaaagaaagatgaaatgaggaatgctcaggaaaaagctggtgatattggaatggaatcagaggtatcaatgtgaactcactattgtaaaatatgtcagccaggcgcagtggctcatgcctgtaatcccaatactttgtgaggccaaggcaggagaatcacctgagcccaagagtttgagagcagcctggacaacatagtaagaccccatctctacaaaacataaatagaattttaaaacatataaaatatgtgtgcttcctagctctctccagaggaagggcctcaaagcaatgacacccaagtagcaacagagtctcttagtgccag[248 bp omitted]ctttagcctgggtgacaaagcgagactccgtctcaaaaaaaaaaaaaaaaagaaaacggtctcttagtgcctcaacacctactcttccctagaaagaaccgggactcctcagaaaaatggccaaccccagggatggggcagaacaaggtccagattacccagactatcttcgtgtgccagaaagtgaggaagtactcccaaaaagtgatggggtatgtccaaaggccacagaagccagcttgaaggggctcccactaaccaaatctggggcaatttgaatattaaaatgaatggcagttacggatcatcatctataaagtcagaatacactaatgctcactgacaacactcaaatatacagggggagaaagagaagtgtttcctttttgctttttttttttttgagacagagtttcactcttgttgcccaggctggagtgcaatggcacaatcttggctcactgcagcctccagctccctggttcaagtgattctcctgcctcagcctcccaagtagctgggattacaggcgtgcaccaccacacctggctaattttttgtatttttagtagaaacggggtttcaccatgttagccaggctggtctcgaactcctgacctcaggtgatccgcctgcctcagcctcccaaagtgctggaattacaggcatgagccaccacacccagccgagaagtgtttccttaaggaaaatgcgatcttataaatgtgggagaaatgacagagtcttttaaattaccctgttgcagccattacagtaataaccattcagggaagaatcattcatggatgataaaattgatggcagtagctgctggctgtggctgcacactccatggagccggtaggagccctgacccttctgagttgggatgggagctccccgtgtgcagctgcagccaccagaaccacagctgcagacccaggccttctgctccacagagcaggcaggatccccgccctcctgggcgggactacagctgcccaaactgctgctgtggatctgagcctctctgtgctcttgcagggagccaggagcaggcaggatctgccctcccgggtgcagctgcagctgcccaacccgcagctacagacccgggcctcccactccagggagcaggcagcagccggggacaagcgagggtcctgccccttccgagttggtggggtgggagctcccagagtgcagctgcagccaccctcccaaccacaggacctaggcatctctgaagttctctgcagcctgtaccctgaacggcccaggaaagcaccaccgcacccccctccccaccccgatccctgcaggctcgagcgtgtctgctcctgctgcttggcctctctcctctctcacacccactctgatctcagagaggggttggggtccagcccagtgccatgaatggcagcaggaggcaggcagattcctgggcagaagagggcaagtacccggtaaggtccctccttcaagccagggagggcctgaaggctgggggccaggttgccagtactgcaaaatgagtggggacttgcaacgtctcctccaggcctgcccatggccacccatggagctaccctctctgctgagagcttcagaggcctgcagagacatctgaacaatctgcctgcggagaggaaccaccctctccagggcctcctcactgctgatagctgaacactggacgagacgacctgcctgcagaggagctgccccctgcaggtctcctctgagctgtcctaacactcggtaaagctcctcttcatcttgctcacgctccacttgtctgcctacctccttcttcctggacacagtacaagaactcgggcaaaggcaccactggccaaggaggtttccagccagaaaagtgacgccgtaaatatcccgtaacaaaatgattgagtgaaggtgtgtcaggggacaagatatttacacagtctcagagaatctccccacagaccacttattcactacaaaaaggaaaactcttcctggctagccaagtgatcaaagacaacatcactagtcatgggacaagttgacatcaggtgcctcctgagatcttgcacaggaaggacacactatcactgctgtgacattccccccaaagtgcagatgccaagtctaatcatgaagaaagatcagataaaccggccgggcgtggtggctcatgcctgtaatcccagaactttgggaggctgaggcgggtggaacaccttaggtcaggagtttgagatcagcctgaccaacatggagaaaccctgtctctactaaaaatacaaaattagccgggcatggtggtgcatgcctgtaatcccagctactcaggaggctgaggcaggagaatcacttgaacccgggaggtggaggttgcagcgagccaagatcacgccattacactccagcctgggcaacaagagtgaaacttagtatcaaaaaagaaaaaaaagaccagataaacccatgtcaggggacatcgcacaacacaaacggcctggatgcttccaaaatgtcaacgtcatggagaaaaaaaagcccaagggactgacccagatgaacagagccagaacaaccaaatgcaacgtgagattctggaccggagcctagagtaggaaaatcaagttcactgtaaaggacatcactgggacaatcagtgaccttgacatatggacggtttagaattctaacaatgttaacctccctgacttggataacagcactgtgtttatgtaaggaaatggcgttgttcttaggaaatgctctctcaagtacttaggagcataatgtctacaacatattgtcaaacagttcagcattcaggataataaattattctcagcaaaacaataattacacacaccaatagtaagagtgggggagaaagagaaaataaatgtggcaaattatcaaactgggtgaaagatatataggagttctttgtataattcttgcacctttttctgtaatttgaaattatttccaaatgaaagtcaagaccggacgcagtggctcacgcctctaatcccagcactttgggaggccgaggcaggcgaattgcctgagctcaggaattcaagactagcctgggca[185 bp omitted]gtggcaggcccctgtagtcccagctactcgggaggctgatacaggagaattgcttgaatctgggaggcacaggctgtagtgagccaagatcacttcactgtgctccagcctggacgacagagtgagactcatctcaaaacaaagaaagaaagaaagtcaaaagagaggggacagggctggttcttcaaagatccccgtggaatgtataataaatggtcttgcttgctcatagattgccctgggtgatactattcagaatgacattctgctttctacaactataaatgaggccacttttttgttggaaatgtcctccaacatttcccaggcctccatgccttttggactaaagcaagcctaccgctctagtcaatcccatacttgaggcctgagtgctagagcaggaagggcaaacagctgtggggaggacctgcgcaggggtccctgtctcctcccctggatttcagggccactgaccttcttcagcttgcggtccacgttcagatagcggttcctgtcgatccgcagcagatccagctcctcccgcagggccgcattccgtaccagctggttgtcaaagtgacaggtgacctgggagtagaaaggtggatggaagagtgggtctgaagccaagtctgcctgcctcctccaagctcagccaaggaggagacacttatcagaggttgggccggcctgtttcctgagaaacagaggttctttggggttcccgaaatcaatgtccactcccctctaaggacccatcattctcctttccttgggaacctccatccctccagaatcctgtgtcctgacacatatgtgcacacactgcccagcatttccagaatccaatgaccatgcccagttcttcccataaccgcacaattcaggtcgagggaccaggagtttgaccctcaccctgtccaactggttttctaggatcctgatccttcgcctgatcttgaccttctgatccaggatgaatcccggggacctgacattcttactgtgggtaaagatccgcgtctcccactcctggatctacaagaaagaggatggtacctgtttttggttgcctgaatgtgggagagattgaatggcccagggaaaatgagtcactaagcatggcaaacatctgctgtccctgtcaccccagaataacatctacccttctgctgacactatccagccctccatgtggttctggtgggccttccaaccacagtgtatcaccctatcagccacatgacccaggtctggacactcacagggattggcctagagatg[132 bp omitted]caacctccacctcccaggctcgagcaattctagtgcctcaacctcccgagtagctgggattacaggcacgtaccaccacacccagctaatttttgtatttttagtagagatggggtttcaccatgttggccaggctgatcttgaactcctgacctcaagtgatccacccgccttggcctcccaaagtgctgggattacaggcaagagccactgcacccggccctgactcctttcctgatagtctgggggaagcacatgagatggaaggatgggattccaggacttctcctgtcatggccccaccacagggagggtcctgggagaatgaggccagtggacagaagtggagatgagagtcggagagacggtgagaatgaacttgatgacattagtagccctgggtctgcttatgcctaagaccagcttccaatctgtcctcatttctgtattcatctgtacttattggggtgtgctctgtctctcccagcaaactgggggttccatgaggacacagagtcttgtgttttctccctgtccgagacaaagaaggtattcaacataacatgcagactaaatagataaatgaattgctcaacacttcaatttgtgctctgttatgggttgaatcatgtcccataaaaactcatatgttggccgggcacggtggctcacacctgtaatcccagcactctgggaggcagaggtgggtgaatcagctgaggtcaggagttcaagaccaccctggccaacatggcgaaaccccacctctactaaaatacaaaaattagcaaggcgtggtggcaggcacctgtaatcccagctactcgggaggctgaggcaggagaattgcttgaacccaggaggagaggttgcagtgagctgagattgtgccactgcactccagcctggggaacagaacaagactccatctcaaaaaaaaaaaaaaaaaaaaccaaaaaaaaacctcacatgttgaagtcttaacccccagtactttagaatgtgaccttatttggagacagagtcttcatagaagtaattaaaatgaggtaattaaggtgggccctaatccactacgacgaggtgttcttagaaaaatgggaaattgctgggtgtggtggctcatgcctgtaatcccaatactttggaaggctgaggcaggatgatctctcgaagccaggagttcaagaccagcctgggccacaaagcaagaccccatctctacaagatacaaaataaattagctgggcatggtggtgcacacctgtagtcctagctacttgggaagctgaggtggcagatcccttgagacaaggagctcgaagctgcagtgagctgtgattgagccactgtactccagcctgggtgacagagggagatcctgtctcaaaacaaaacaaaacaaaaaaggaaatttggacatagatacgcacacagggagaatgccacgtaaggataaagacagaggtcaggtgtggtggctcacgcctgtaatcccaacactttcggaggctgagatgggtggataacttgaggtcaggagttcgagaccagcctggccaacatggcgaaaccccatctctactaaacatacaaaaattagccaggtgtggtggcacatgcctgtaatcccagctacttgggaggctgaggcaggagaatcgcttgaacccagggggtggaggctgcagtgagctgagagattgggtgacatgtctacaagccaaagtacccaagactgccagcaaaccggcagaagcagagagagagaggcatggaacagacagattctcccccacactgctcagaaggaaccaaacctgcctacatcttgatcttggacttctggcctttggaactatgagaaaacatatttttgttatacgagccacccaatttgtggaactttgtcatagcagccctaacaaactaatccacgtaccaaagataccccagaaggctgcagcaaacttaagactcagcatgaggatgttttaaatttttgaggaagaccttgatattggtcagataccacatgaactgctagcttaaggcagttcacaagttcaacatgagagggcgctatcatccttttgaagatgtcacatctttgtgagactggattttcagcagttgctgcaataaaagccaaatacccaattgttggtgggcgcagtgtctcacgcctgtaatcccagcactttgagaggccgaggcgagtggatcacctgaggtcaggagtttgagaccagcctggccaaaatggtgaaaccccatctctactaaaaatacaaaaattagctgggcgtaatggcacgtgactgtaatcccagctactcgggtggctgaagcacgagaatcacttgagcctggcctgggaggtggaggctgcaatgagccgagattgcaccactgcactccagcctgggtgactgagcgagactccacctcaaaaaagaaaagaaaaagaaatgtccaaaatgttgacactgggggaaaatgcagcaaagtgtacaagggatgtctctgcattatttctttcaactgcacatgaatcccaacaaaattttctttctttcttttattttttcttttttttagagacagggtctcactctgtcacccaggccgagtgcagtggcaccatcatagctcactgcagcctccacctcccaggccaggctcaagcaatcctcctgcctcagtaattgctttatgaaagaagag[138 bp omitted]catggcgaaaccccgtctctactaaaaatacaaaattagccaggcatcgtggcaggcacccgtagtcccaactacccaggaggctgaggcagaagagttgcttgaacccaggaggtggagattgcagtgagctgagactgcgccactgcactccagcctgggtgacagagcgagactccatctctaaataaataaataaactgtgtaattgttatgttttgacataaaatagtgaaaatatccatcgcccctaaaagtttcctcatgcccttttgtatttcctcacctcatcctcttcctgcagtcgagtctccccccagcaatcactcatctgttttctgtcactatagattggtttgattttctagaattttatattaatggaattgtatagtaaggactcttttggggatcaaaggggtatctggtttctttcactcagagtagttattttgagattcacccatgttgtgtgtatcaatagccggttccttttattcatgagtcacattccattccatgtatagaccacaatttgctcgtccactcgaccaccgatggacatttgggttgtttcagttttcgattttacaaatcaagttgggttgttatgaatattcatgtacaattcattatatggacatgtgctttctttcctcttggctaaacatctaggagtggaatgtctgaatcatattgtcaagtatacgttttgttttttggcaactgccaaactgggccaggcacggtggcccacacctgtaatcccagcactttggaaggccgaggcaggtggatcacttgaggtcaggagttcaagaccagcctggccaacatagtgaaaccccccatctctactaaaaatataaaaattagctgggagtggtggcacacacctgtaatcccagctactcaggaggctgagacaggagaatgtttgaacccaggagacagaggttgcagtgagttgacattgtgccattgcactccagcctgggtgacagagcgagacttcgtcaaaaaaaaaaaaacaaacctgcctaactgtgcaaactgtgtaccaaaagtagtgtgccattccacattcccaccagtggagtatgagagttctgcttcctctacatccttcccgcaacacttggtatggaccgtctttttaatggagtttgggaaagttcttaatatattctggatacaagttctctatcagatacgtgctttgcagatattttctcccagtctggaccttgtcttttcattccttgcctttgccagtttctgcagatgggattccttgacttggggactccttacctgtggccgcatcactggtttttgttttttaaaggggttccgagccaggcacaatggctcacgcttgtaaccccagcactttgggaggccacggtgagtggatcacctgaggccacgagtttgagaccagcctggccaacatggcaaaacctcatctctaccaaaaaatacaaaaatgagctgggcttggtggcacgtgcctgtaatcccagctactcaggaggctgaggcaggaggatcgcttgaacctgggaggtggaggttgcagtgagccaagatcctgccagccactgcactccagcctgggtgacagagcgagactttgtcttgaaaagaaaaagaaagtgggtctctctctgttgcccaggctggagtgcaacggggcaatcacagctcactgaagcctcaaactcctgggctcaagtagctctgccccctcagcctcaagacacgcaccactgtgcccaactgacaaattggttttttcaatgaaggctagaccagaatttagcagaatgaatcccacattaaaaaatgtatatatatatatatattatttgctgaaacttctgtttcagatatattaatatatgtgtgtgtgtatatctgtatgcatcttggtgtgtatgaactacacctcatgagtcatggtcataaaaacttgacagatcactggcctagaaaaatcacattgtttgcaaggtcaaatagcaaggtcccaaaacagatgggattcgcaacctgtctagactgtggcattaccaccgtccttgtttgcagatgaagaaactagggcccagagaggggaaaacctgcctgcccccgatcacagagctccgatggcagagccaggactctaatgcaggttttggggactctaacatgcgaacctttcctgcttaaccacaccagtcctgtttttgaatgcctgggactgtgctaaagcagcaaacatctatgtttccactgaacacaactctaccagatggatgctttcaatagccccgatttttttttttttttgagacagagtcttgctctgtcaaccaggctggagtgcagcggcgcgatcttggctcactgaaacctctgccccccgggtttaaacgattctcctggccgagcacagtggctcacgcctgtaatctcagcactttgggaggccgaggtgggcggatcacaaggtcaggagatcaagaccatcttggctaacacagtaaaatcctgtctctactaaaaatacaaaaaaagtagccaggcctggtggtgggcacctgtagtcccagctactcgggaagctgaggcaggagaatagcatgaacctgggaggcgaagcttgcagtgagccgagattgtgccaatgcactccagcctgggcgacagagcaagactccgtctcaaaaacaaaacaaaagaaaaactattctcctgcttcagcctctcgagtagctgggattacaggcatgtgccaccatgcctggctaatttttgtattttttgtagagatggggtttcaccacgttggccaggctggtcttgaactcctgacctcaagtgatctgcccgcctcagcctcccaatgtgctgggattacaggcatgagccactgtgcccggcctaatagccccaatttcacatgaggaagctaaggctcagggaggttacaacacttgcccgtaagcaggatccgtagaaccacctctcaaaccccacctgcttgtccagggccctggtctgctcctgcagctcctcgatctccgcctgcacctgggcccggcccttcagcaggcggtccatgttctccagccgctgactgtcccgaagccgcttgacctggttctgggctgcgctgatctgcacctggagatcgccccgtacctcctccaagcgccggatctcctcactacccaggcagggaggtggaagaggggccagtaagggggcagaactcagcatcactaaaggcaggacccaggagtccagtcttcagcccctctgaccccctcctccccagctcagggcccaggcgcccagctcacagttgcttgttgatgcgctggtggacttccttgctgtaggcccgcctctccccttccatcactttgcattgtcgctgcagcctactcagctcccaatccactgagaacagggccagccaagggactcagcagggatcctggccaccagctcctcccaacccaggacctaggaattctgctccctttggggtctcacaaactgcaactgaactgcagatccagcccccaacacccctctaggaatgcacctcagttccgggatccctcgagcttcctcatcccttcatacccaaaactgaactcagggtttttttcccctaaaacccactcccatcccaccagagggcacttctggaaggcctctgggtcttctgggacctgggcacaccacctggaattgggaaggctcttgctccctccctccttttctgccccaccatcagcagccctcagccccatcctcttgcctcctccctctctcaacccatcccctgggctcagcctcatcctctcctacctggaccatcaccccaacctttctctcaacttccagccttcctgcacagtcccagagggtctctctacacccacagccaaccctaccccacccacagcagaccctacccctcataggcctcccatgatgccccagtacctgcaggacaaagtctcagcacctcagcctgggatcccagaccccaagtgacctgaccttacccacctctccagtcttgcccgtatgctccccatctccaaaggcccagtagttttcaatcagcgggtgattctgccttccaaaaacatttggcaatgtctggagacttatttttttctagacagggtctcgctctgtcccccaggctctagcgcagtggcacaatctcagctcactgcagcctccacctcgcaggctcaagtgatccgcccacctcagcctcccgagtagctgggattatgggtgcacgccatcacacctggctaattttattttatttttgtagagatgaggtctcactgtgttgctcaggctggtcttgaactcctgggctcaagtgatcctccttcctcagcttcccaaagtgctgggattacaggcatgagccagcatgctcagcctagagacatttgtcattgtcatgacttgtggagaagggagggggctactggtatccagtgagtagaagccatggacactgcttggcatcctacgacacacaggactgcccccacaacaaagaattatcccaccccaagagtcaacagtaccaaggttgagaaagcctactctagccacattctgtcatctctgtagaaacacccttccttccttctccccttggcaattcctacagggagttctgggccccactcaaacttctgctgcctgaagtctccagcctgccccactgcccaggcttggcccacccaccgtggtgcccgccccgcctcccttagggcgcatgtctgttcccaccagagggcgctcctggacagacactctccctccctccctacaggacctggaacttgggaaagctgggggctggaaaagaatgggtgaatgatataaagaatgaatgaattacccattccctccagaaatgcctcgcttccctcctcggagcgggcgctccctgccaagcgtcccaaaggcatcctggccaaacagggtggggctcctgtagggatggacatataagacccttcagacagcaggcgggccagggcccagagagggtggacaatgaactgcgagggactgggaattgaaagggggtgaccctagaaccacgctggcctcattcctccaagaggggttggagggggacctctctcaggcctctcccacacctctccagccctcccacctctcacactctgggtcttgcgtctaggctccgattctggcgcgggtttggcaggggacaggcctcctgggctctcaggatatctgaggccaggctgtttggtcgcaggagagggggaaaccccggcctgctgtagtgggggttgggcagggtcgggggagtcctgggccctacctgccgacgggcctgacctgttcttggtgctccaagttcagtgttgtggtctggttactggggagataagggaccaatgaggactgaggacagcggccagggagggactgaggccgcgggagaaactatgggaggaggggcggagaaggatgcgaggcgtagacctgcagggttcccacggactgagaactgatgggcaaggccaggcgcggtggctcacgcctgcaatcccagcattttgggaggccgaggcgggcgcatcacttgaggtcacgagttcgagaccaacctggccaacatggtgaaaccccgtctctactaaaagtacaaaaaattagccggacatggcggctcgtgcctgtaatcccagctactcaggaggctggggc[138 bp omitted]cctgaaaggggcggagccgggagggcctgtggagcggtgctgcggagccctgagaggtgcacggctgtgaggcctgagaggggcgtgccgtagggagctgtgatgggcggggctgagacctgtgaggagagtgagtgggaagaacttcgaggggcggggcttcggggccggcgaggggaggggcacggacaccagtacaggacggggcttcgcagacagcgagcggaggggcttccccgtaaggggcgggcttcgagggtcgcgtttggaaggccttacgaggggcccggtggaagggcggtgaagggcgggctaatcgggaggcgctcaggccttgaaggcctgcgggaggtcgaaatggtcctggggaggtcgaggctgaggtctcactagtaccgcgggcctggaagcggcgggagttgaaagagcctgcggtgacctgtatggaagccctcgaagccaggccgaggtcctacaagacggagcccgagaggtgccggtcttaagctgactgtgaccacgttaaattaaggattcataggaaggaaggcggtgtcgaagccgggagttgcgcggagaaggagcgctcaacacagcctcagcggttcactacgcaagcgcgaccaacggcttcccgggaagcagccaaaaacgcttggccgcctaccacgtccgcgcgctggagggcggaagtgggtgagacctcgggcactccataccgccccccggtttctggccacgccccctctggttacacccactcgctctgtaaggcacgccccctccgcggcggcggctgctgcccacgtgggcctccccgggcgggcgggcagtgggcgcctctccctgcaggctgggtgtgcccgaagcctgcggtttcctgtgggaggaagcggcctgcgtacgctcagctcagctcataatctcggaggcccaggatggggagatcccgccgccaccctcagatcctttgattcttccccttctacatagccatagtgcggggacccccctaatatccccagggtacccaagcctggcgccgatcccactcagggaacttgattctgagtcctagactcgtgtttttcacctccccggctcaagtttccatcttcctagcccctggctccccctagtcctctcaagaaagtggagccctcttttcctgctccccaagaggaacgtatgtctccccagcccctaatttttccttcagtgacccagactttgcaacttccttagggatctgagtgcggaccccagtttctgtctctcaggcacttaagtttgagactacttattctcccccagggaccctcattttggattcccaactttagccttgagacccaatggacccaagaatttgccccttccccaactcctagagatcctgaatcagggtcccccagtactgactccactcagagccccaatgcctgatatgactagcactaccctaagaactgccctataatgtatttactattatctctatttttcagatgaagagactgaggcatagagaagttattagtaacttgccaaaaattacacagccattgagtaaaacagcttggattttgagtccaaccagtgtggctctagagtctgtgctatactggtattccagcttccaggtcttggggtacccagccaagcactgaactgtccatccctcaccccctcagggagcccgaatcaccaacagctatcccaaacccagctctggcccatcagatacccagacatcccatcatccagttcccttccctggatccaggatttgaattcccctgctctcaatttatcagagttctgggcacctggtcccctcccaagagactcgtgtacatagtagtcatcaccccgaccctaatttaatatccccaaaattaataataatagttaacagtaaacctttggggccaggcacagtgtcttacgcctgtaatcccatcattttgggaggccaaggcaggcagatcactggaggtcaggagttcgaggccagcctggccaacatggagaaacccccgtctctactaaaaatacaaaaattggctgggcgtggtggcgggcacctgtaatcccagctactcaggaggctgaggcaggagaatcgcttgaaccgggaggtggaggttgcagtgagctgagatcatgccactgcactccagcctggatgacagagcaagactccatctcaaaaaaaaaataaaaatctttggtactacactctgttaaaacctaatggctttccactgcacttagaatgaaatccaagcccctcccctagtcttcaagggcaccctttgatttcccttctcaccactccctctgtctccctgtgctccagccacactggcccttctgtctgctccctaaacaacctgagcttgttctcaaaagctttaagagcttttgcacttcctctccccccgacgcccccccaccactccccaaccccagcgttcaaatgactcctgtcttcagctcaaatgttacctcctccaagaggccttccctgattttcctgtttcaagtagtcttccctgcactctgtcattatctccatcactctgtttgatttattattgtatttatttttcttttcttcttttatttttttttttctttaagatggagtcttgctctgtcacccaggatggagtgcagtagcgtgatttcagcttactgcaacctccgcctcccgggttcaagcaattctcctgtctcagcctcctgagtagctgggttacaggcgcccactaccatgcctggctaatttttgtatttttagtagagacagggtttcaccatgttggccaggctggtcttgaactctcgacctcaggtgatcctccagccttggcctcccaaagtgctgagattacaggcatgagccaccacgtccagcctattgtatttatttttcaagtcacttatccttatctgagatttatcttcatcattgatgttttctcttgtctgtcttcctctactagaatacaagctccataataccagcagggctcatgtctgttttcattattaactcccagatcagagtacatgttcaataaatgtttgatgaaggaaggaacaggttaggtgtgtgagtgtgccagtattaccttattcattcagcataagtatcagaattattattatcagtattagtattttgtcagcattattatactctcaacatagactaagatactggagcccaggtgggtgaaataattggctcaaggtcactgaaccaggaaatgatggcgctgggattcttagcttccgcttcctccccgcttccagagtttcacaaggtttttttttttgtttgtttgttttttgttttgttttgttttttttttgcgacagaatctcactttgtcccccaggttggaaggcagtggtgcaaactcaactcactgcagcctccacctctcgcgttcaagcgattctcatggctcagcctcccaagtagctgggattacagtcgcccgccaccacgcccggctaatttttgtatttttgatagagacgggtttccac[140 bp omitted]ccacggggccaacttcaccagcccaatctcaagtccatgccacagaaatctggcctcttttcccagactcctatccagctccaagctccatcagggaaagcagacatccggccccagggcaagacctcaaaactcaagggtcctgagaatcgggccctcccacccctgacgcttgccccccccaagaaccccattccaagagtttctcatctcaaccctgggagggagccccagatgatgtctgtctggagggattgggtgggggcccaaagaaagaggaaccggagtgcctgggccctcccactggcagccgacctcagctgggtgcggtgagggtgggtttataaaagggtcagtatatattgagaggaggagagaaagagaaacgggagcaagagagaaggaggcccagacagtgagggcaggagggagagaagagacgcagaaggagagcgagcgagagagaaagggttctggattggaggggagagcaagggagggaggaaggcggtgagagaggcgggggcctcgggagggtgaaaggagggaggagaagggcggggcacggaggcccgagcgagggacaagactccgactccagctctgacttttttcgcggctctcggtaagtttccagtccgttattcagggctgggacttcttaatttacttgggaatgtagcagtttgggaaggacacccccaggctgggagagacgtccctgactcttggaaatccttttaatttaataagtgatctcttagcacttgaggtggggatatgggaaggggtggggcccggcaaagttttggggtcccagcagagccctccactggaaaacttcctgcagtttttccctcagcggtgtccactgtcctctggggtccctgagatcagggcattgcatgagaacaccccaaatctgggagacctctaggtcccctgttcctgggcaccaaagagtcctgggaggctaactccttcttgggcctctcttccccccagcgcgaatcctatccatttcctccagaagatgtccaacagtcaccagtctggcagcagggtggggtgaggacctcgtggacatagccaggggctggggtttccctggtgcttagagatgggggggggtggggatgagtcaccagatgactcaccaggtccccctcctcccctcaacccaggagaggagtggtgtgagtcaagaatgcctgttgctgggggcagctcctcaatcctgatgtcggggtgcagggtggggtctcaacttgaattttcactatctggcctgtatgtaacccagagtcagggttctggggagagaggagccacattgctagtcctcctcattcaaggaacccaagagtccatctttggccctctccacccctccagccaatggggatctcaggaatccaggccccagcggtctcctccctgagagacccaggagtctgcacccatgcccttcctccatcaggagacatctcacctgcctttatgccaaatttttttttttttttgagacggagtctttctctgtcacccaggctggagtgcaatggcatgatcttggctcattgcaacctttgcctcctggattccagtgattctcctgcctcagcctcccgagtagctgggattacaggtgtgcaccaccacacccagctaattttgtatttttagtagagatggggtttcaccatgttggccaggctggtctcgatctcctgacctcaggtgatcctcccgcctcggcctcccaaagtgctggggttataggcgtgagtgtgcctggcctgtgccaacctcttgagactccgtcccctgctccccctccccaggcttccactgcagccatgtcactcctcttgctggtggtctcagcccttcacatcctcattcttatactgcttttcgtggccactttggacaaggtaagcctacttggagctcagggcccttctgttcccctttggaatcttgccacgcccctcctctaaaggcattctggccccaccccctttacctagtatttcttttttattttatttcatttattttgagacaagggtctcactctgtcccccaggctggagtgcagtggtgcgatctcggctcactgcaacctcggcctcccgggttcaagcgattctcctgtctcagccccccaagtagctgggattagaggcacctgccaccaagcccggctaatttttttattttggtagagacggggtttcaccatgttgcccaggctggtctcgaacccctggcctcaagtgatccacctgcctcggcctcccacagtgctgggattacaggcatgaaccaccaggttaacccttttagctctacctccgatgcctcctccctgtcctgaccctaccccctctcatattaaatcctaactctccccagttctgccccatcccagataccctgcccttttcccagcccttcccacagtctgcctgaccctatcccctctcctttcctaaccctgccccttgtttcgttctctgtccatcccagtcctggtggactctccctgggaaagagtccctgaatctctggtacgactgcacgtggaacaacgacaccaaaacatgggcctgcagtaatgtcagcgagaatggtgaggggtgagggcggcgggactggtcttcaaaggggaaggtaaacccttcgtgtcctcatgggactgagaattgggaaccctcccccaacaaagttggagtgggcggggtccaggcctgagtggctgagtgcctagggctaatgcatgtcccgcctgtctggatgtacctacctcttgttttttttgtttttgttttttgagaccgagttttcctctggttgcccaggctggagtgcagtggcgcaatcttggctcactgcaacctctccctccggggtccgagcaattctcctgcctcagcctcccgagtagctgggactgcaggtgtgtgccaccacgcctggctaattttgcatttttagtagagacaggtttcaccatgttggccaggctggtcttgaacttctgacttcagctaatccacctgcttcagcctcccaaagtgctgagattacaggcgtgagccaccacatccagccagtacctcctgttctgaagaggccatatagataaaagcatgctataggtttaaagaatagagaggggaggccaa[133 bp omitted]gaggcagaagaatcgcttgaacccaggaggtggaggttgcagtgagctgagattgcactactgcactccagcctgggcaacagagcaagattctgtctcaaaaaaaaaaaaaaaaaaaaagaatagagaaaaatctcccaagattctgagaagacaagagtatttttccaaagctctaaggagatggggctggtgctctgaatggatgcctgggaccatttcatccaaattccaaggggatggggctgaaaccacttaaggttctaaaggggtggggccaggtgcattggagttctaaaggaatagagctgcatctatctaaagttctgtgtgaaagatttaatgcaaaactaagattaaaggaagtggtctgctctcaccacttctattcaaccttttactggagtagccaatgcaagaaggcaagaaaaagaaataaagggcatgggaaataaattaggaaaaagtgtctctattcccagtaaacatgttgtttatgtagaaaatccattaaaattctgcaaagcagacagacacagtggctcacacctgtaatcccagcaccttgggaggctgaggaggaaggatcacttaagcccaggagttcaagaccagcctggacaacatagggaaaccctgtctctacaaaaatttaaaaattacccaggttgtggtggcttgtgcctgtggtcccagctactcaggaggcaggggtgagagaatttcttgagccctgaaggacgaggctgcagtgagccatgattataccactgcactccagcttgggcaacagagcaagacctggtttcagaaaaaaaagaaaaaggaaattggcaaagcaactactagaactgagaagggaatatagcaaggtaacagggctcaaggtcaaaataagtgatacatctaagtatctaggcttgtatgggcctaaacgggagcagggatggggcagagaagggtcacatggtgagcaagcaggtgaagctggaactctggacccacggtgatgtccccctctgtgtcctccttactgcaggctggctgaaggcggtgcaggtcctcatggtgctctccctcattctctgctgtctctccttcatcctgttcatgttccagctctacaccatgcgacgaggaggtctcttctatgccaccggcctctgccagctttgcaccagtgagcactgcccctccccaaccctaatcccccaagaattgagcagaagggagtggggtgtgtcaagatgctgggggccctgagaatgggcctctcgtagaaaaaaacaactttcaacaccccacgagccacaagaggtgcctccgtgggctacatctctgcccccagggattgctgggacttgtagttttcagtggctaatgatagttatggcttgtgcgtatgagtcatcagggaactcagagtttcagggagccggggctggggaaggaggtataggtaaatagttttggtcccagggatcggccgtgacgtggggggataaactaattagtacctcagtagagagctctaaatcataataataatggtatttatatcagccaaccgctgtttcttgcgtgcctattgtgcatcagatacttcaagaagttttgcgtactttttaattttttgacttaaggtgcaaagggctaacttaatcacagtcagtttggggaacattataggttcttgcaaagcttctctcttggtttatgaatttactactgcatgtttggcttatagaaacacactcaaaaatattccttggatggatagagagatattattggacctagagagattaaatcagttacctaaggccgcgctacagttgcacggcgctgggcgggggggaaagaaccacaactcccagcaggcagcggcgctgcccacgggccctccggcgcttctttgcccccatgggatattgggaaatgtagtcttgagggggcactgcatgacgtgtggttttcatcttccgcaggcgtggcggtgtttactggcgccttgatctatgccattcacgccgaggagatcctggagaagcacccgcgagggggcagcttcggatactgcttcgccctggcctgggtggccttccccctcgccctggtcagcggcatcatctacatccacctacggaagcgggagtgagcgccccgcctcgctcggctgcccccgccccttcccggcccccctcgccgcgcgtcctccaaaaaataaaaccttaaccgcgggctctgccttgatcttccttccttccgcctccagggacccaggctgcgcacgcttgacctctcctgaacctaacatggtccccaccgccagctgctcagccctcagaatgcccatctcccagcccccaaccccttcctcccgaggacacaggagccgggaccccaggcaccttttccctcccacagacccaagagcctgggccttccccgctcaaggcccaagagacctctgtgaggcacctgaatctagaccttcagacacttctgggaagaacctggattctgggtcccagcagaccctgttaggataggaagcctgcagtgaccagtcctgtctccttgctcaagcttctgtcactctgttgctctctctctctgaaccccgggcatagtgtgtgtttctagattgtcggactctttttttctttctgtccaggttggagtgcagtggtacgatctcagctcactgcaacctccgcctcccgggttgaagcgattctcctgcctcagcctcccgagtagctgggactacaggcacgagccaccacacccggctagttctggactcttttttctttctactaactttccatttgggaagacagctttctttttccctctaggaaaccagtctccctctctctcttttttttttttttttttttttttgagacggagtctcgctctgtcacctaggctgtagtgcagtggtgcgatcttcactcactgcaacctccgcctcccgggttcaagcaattctcctgcctcagcctcctgagcagctgggattacaggcgcccaccaccacgtccggctaatttttgtatctttagtagacacggggtttcaccatgttggccaggctggtcttgaactcctgacctcaggtgatccacccacctcagcctcccaaagtgctgggattacaggcgggagccaccgcgcccagcccagtctccctctctagggactgaacatttggggtcctagagagggagacttcccctgtctccccaaaggctgcctctagcccatatgacacgttagcaaaaattaggaggcaccccttcttctggctgacccagccccacaccaggatacatgtaggggtatgggctgggtcttacagccacccacccgtggctgtgttcctttgtgcagttaacaatctgcacaggccgggtgcggtggctcacgcctgtaatcccagtactttgggaggctgaggcaggtggatcacctgaggtcaggagttcgagaccagcctggccaacatggtgaaaccccgtctctactgaaaatacaaaaaattagccaggcgcggtggcaggcgcctcccagctactcgggaggctgaggcaggagaatcacttgaacccaggaggcggaggttgcagtgagccaagatcatgccattgcattccagcctgggcaacaagcgcgaaactccatctcaagaacaaaaaaaaatctgcaaatctgcacaatcgcacatggctacgctatctcctctgttcatcaggccctgggactcctctggaatcagatccttctaagatcctcttctatgactgtctttgtttcaccgaccatgaacccagcctctttttaggactacagctttctctgtctgggaccccaagacctagctagagtccctcccctctttccaggattcaaatgctttccttccctccaactcctgcagccatcccactcatctagatttttaaaaataattttttaaccactcctacagagcagggttaccctaaaggcagtgcgttaagagtagcctcatccagacttattaaacatgatttattactttgggacaggagacgggagaaattgatagaccaataaatattgcacaggctgctggtggtggggagatccagaccgaggtagtttctgtagaaagggtgaaagacctgggcgaggaaggcacctgaggttgccgggagccaggttgggagcgagtcttggtggcgagggtggtttctggttcacctacctagcacaaggtctccaactccttcagcctagacaccctgatcagcagctgaccagttggcctgccatttaagcagcagcaattgatagcaagatcaggtttcctttagaaattcttattggttccttccctgcagcgacaaccggctgcccaaagttgatggaacccagcagctgtcactggacgtttgccaggaggcagggctaacggccttggtgcacatgatgggcagtttgcccggagcgggctgaaaaagacaatgatatatagtctcgggagggcgcagctttaactcttctacctggcggtttacagaagccagagctgagcagctgtgattggcagacaccctcagctcctcagccaaaccacacttggatgtttatggtgagggtgggactaagaaatggaacagaagcagagctaaatcgctttgattggctgttcatcgaaggggcggggaagacttaacaactgctagctgctttgattggctgctttgcttaagcacacagtgcagcaaaaataatcacctgtcagttattggaagttggagtgaaaagtataataaccgtaattgacagcctgtcgtgaaggaggcggggcttagttcctagcctgctgactgggcagggaggtaggttctactcaggagatgttactgctgggcgtggcttgcgggggctcggaagtgatcggagccactgggtctagtttggggaaacccgggggtgggtacaatcccatgctgggggtcagggcctgcagatgcgccagggcccgagttccgttgaaggtcacctcacagcctgacttggctaggagccagttctccacctccgaccggagccacctggaggtctctgcaaggggagaggcaggtgttctgaggtcacactgagatcggggaagattcgagggagcagcaaggaggggcgtagggcaaagaacaggaagggcctgggtttgggagaagcctaggagtgatcttgaggcttggaggggagcggaacaaggcccaggagggtcgagagggccagaaggcccagctctggggctttcgtctggggaccagtcaggggctcttgggcagggaaggtgggggctcctgtaggcaaggggaccacctggagcccacacagggagcgcgcaggatctcttgtagggagagtgtcagctcaggtagaggaaagaatgacaggagggggccgtgccatggagccaagactcccaaccaggctgaggttaagaaagggctgtcacatcaggcaccaagatcggagtctggattcggaggtcctgtctgctgagggccggggtctcttcgcaaacccgtcaggttcacccgtgggaactgggggtggggacgcatctcgctggggcggggcctcgcgggggtgtggcccctgggggcagggtcccagggccacgtcctaccttcgggcgagccttgagtgccccctggccgccgggccaggaagctgtgagccagcagcgcctccttggtgtgctcgtcctgcgcgcgcagggccagggcgctgagcagctccgagttgttggacgtactgcgatagtacagcatgtgcgccagctccaacgcctgcgcgctgcgccgctgcccgaacatctgcaggcgggacagcgccccgtgggctcagttcggggtgcgcccccacccatacacagcccccggggtcacccccgctggcacggcccacgccgcttactcccctgaggaggcggggaggtcctacccagacctcttcagtacgggtccccagagctcagtcgagggatctatttggggatttttggggtctgtcttttctttttctttctttttctctctttctttctttctttctttctttctttctttctttctttctttctttctttctttctttctttttctttctttctttcgttctttctttcttttctttctttctctttctttcttttcttttctttctttctttttcttccttccttcctttctttcttttctttcctttttttttttttttcgacagggtctcgccctgtagcccagtctggagttcagtggctattcacaggcaaactcataacgcactgaagctttgaactcccgggctcaagcgatcctcccgccttggcctcctaagtagctgggactacaggtgtgcgccaccaagcccgatattttttgtagagacgggattctccctgtgttgaccaggctggtctcaaactcccagcctggagtgatcctcgctcctcagcctcccatagtgctggggttacaggcgtgacccaaggcaccggctggggatctgtatttttaacacacgtgccctcattccagtggctccaagaccaccagccccatctggcctacagttttcagcaaccactgcactggtttgctcatctgagccatgtattaatggatttacccaaaggtttgcagatgataggagttttagctttgaaagattttgttacaatacatccttatgttttagagacataataaagtatttccaaataagtctaggtaggatttacttcaaaatcatccaatagtaggacagtggaggtcttcaggggaaatctgattaactattgctaattgttgatgctaggtgctggctagtggagtttatcatactatcctatttctgtgtttgtttgaacttttctataatgaaggaaaaaatggtttaaaatattaaactgtaggccaagtgcagtggctcaggcctgtaatcccaacgctgagaggccaaggtgggtggatcacctgagcccaggagttcaagaccagcttgggcaacatggcaaaagc[137 bp omitted]atggagaaacccgtctctactaaaaatacaaaattagccgggcatggtggctcatgcctgtaatcccagctacccgggaggctgaggcaggagaatcgcttgaacctgggaagcagaggttgcagtgagccgagatcatgccattgcactccagcctgggcaacaagaatgaaactctgcctcaaaaaataataataataataattagctgggtgtgatggtgagcacctgtagtcccagctactcatgaggctgaagcaggagaatcacctgaacccaggaggctgaggctacagtgagccatgatcataccactgcactccaggctgggcaacagagtgagaccctgtctcaaaaaaagaaaaaagttaaattgtaaagagaagaggagaggggaaggatgttggggggaagaacaggtctgggcccagctgtctactggctgcccacttccccaccgttagtctctttgcttggacccctcttctcatccttgatattggtaaggagaaatgagggcatcagtgccctctgggctcccactgaaaaactgtgcccaggccagatgcagtggctgacacctgtaatccctgcactttgggaggatgaggagggcagatcacttgaggttaggagttcgagaccaacctgggcaacatggtgaaaccccatctctactaaaaatacaaaaattagacctggcacggtggttcatgcctgtaattctagcactttgggaggccgagacgggcagatcacttgaggtcaggagttcgaaaccagcctggccaacatggtgaaaccttgtctctactaaaaatacaaaaaaaaaaaattagtcaggtatggtgacaggcacctgtaatcccagctacttgggaggctgaggcaggagagtcgcttgagcccgggaagtggaggttgcagtgagccaggattgcgccactgcactccagcctgggcaacagagtgggactctgtctcaaaaaaataaataaataaaaatacaaaaattagtcaggtgtgtgtcatgtgcctgtaattcccgctactcaggaggctgaggcaagagaatctcttgaacccgggaggcagaagttgcagtgagccgagatcgtgccacggcactttagcctg[203 bp omitted]cgtggtggtgggtgcctgtagtcccagctactcaggaggctgaggcaggagaatggcgtgaacctgggaggcggagcttgcagtgagctgagatcgcaccactgcactccagcctgggtgacagagcaagactcagtctcacaaaaaaaaaaaagaaaaaagaaaaaaaagaaaacctgtacctgtacccagattcctccattcagccacaaaatgagctcagggccactggaccctgtagctggcaggcctggctgcctgacccactaaacccttaccggctgcccctggtaagacctaagtcctcagtcagcactgtctgtacaacaatgccaatgccaggg[224 bp omitted]aggcaggagaatggcttgaacccaggaggcagaggttgcagtgagctgaggttgcaccactgcactccagcctgggggacagagcgagactccatctcaaaaaaagaagaaaaaaaaaaaacattgggacaaagcctggcccctcagaaacacttaccaaacatcagctactatggaacagtcacccacaccctgtgctgggtgcccatagggtgttcccatctcacaccgaggcctgaggtgaaatgcctctcaagtcagcgcaccccagaaaatcgctgaaatggcctgcaaggtaccaatgacacgcttgcatgtggactgtaccctcttctcaccaggccagcacagtcagtttaggtgcctgcattggaacgaatcgccatttcttcggttgagggcaagatgcaggaatagcatgcgttagggaccgtgtggtatgaaaaacacattgggtttgtgtcagtatctgccaagccgatggagctgaattctagttaaaggagcaggtcactctgtggcacacagatgaagccagagtctccctggagaggggtccccctgccacccggagggtcccttcagcactaccgctgcccacaaggaatacagcactcgctcctcctaccctggggtctatgtcttgggcagcccctccacctactcagtcacaggccaggcccctggcaccatccttgctcccccttcgccaacctgtcagtcccaaccccattctgcagtcccctgactctctctgcccgtctcctcctctgcagctccccagctcatccttggctcagactttatccccgcctgcatcactccagcctcctccctggcctcagtctccccgtccagtttgtctgcacataggttcagagctgcccctgcccctcccctgctcatggtcctcccatggctccccagtgctctcagagtccaagctccgtggcccggcacacgaggccctccctgtcacctcctgctcctcccctgtgaatgcagcgcatgctgaaaaagccggtttaccctgaacaggtcctgctctctcaggcctccaggcccaggcacaagccaaaccacccctggtgtgttcttggaaaatgttcactgcctcatcctcaaggctcaggatggacatcacctctcgcggacgagcagatgcagcctcgggctcctgctgtgccagctgccgcctccattacagaccgactgcctgtgtccagggaccccacacctctccctccagggcaggatcgggctgctgcatctcaggggcaccagttcaacatccctccccaggctgccccatgggcctgcttggtgctgggctaaggggcttcacagtagagcccagggtatggaggaacccacaggggcaccaccccagcctgggacatccgggaaggcttcccagagcaggcagcctctgagctgagggtgaggggtgagcaggggttggccagcccaacaagaggaaagggcatttcagtccaagggaacagcacaggcaaaggcagagaacgagggatggcagggtgggggcgccgcaagcatgcaggaggagctgaggcgcagattcgaggggaaggattgtgtccagtgaggctgggaagcagggtccctggtgccaggctgtgcccagaggaggggcagggcaggactgggtagaatggggaatgggctggaagggaccaactggaggctgggaagagggcctgagcagggggcacagaggtgggacaggaagggtgggctgggggtctagccagtgactggcgggatgacaggtcatccttagatgcggagcccagaagagaagatgtcaggggagacgctgtgcttggcctacagtgagagtgagggccccagccgggaggctgagcctggagcttcttggttgatctgatcatggacagtagagagctcctgtggaaaccacagaagcagagcagccctgtgtcttggaagaaagagggccccatactccgcatcccgcaccttgctccccgcaccccttatcccgcagtggggctctgagtgcctgttccaaggtgagatggggaacttgagaggagcaggagggttgaggcagctggactctgggctcatggggacacgctgcacatgggcttgggtgtgtccagggaacaggagaagccagattaggggactaggggaggggcttgcaatgaagacagagatctgggagcaactgaagcgcaggaggggaccagccaggagggagtctgggagggccaactgtttttttgtttctttgtttgtttgtttgtgttgggatgggagtctcgctctgtcaccgaggctggaatgcagtggcgcaatctcagctcactgcaacctccacctcccgagttcaagtgattctcctgcctcagcctctcaagtagctgggatttcaggcatgcgccaccacgcctggctaatttttgtatttttagtagagatggggtttcactacgttggccaggctggtctcgaactcctgactgcatgtgatctgcctgcctcagcctcccaaagtgctgggattacaggtatgagccactgcacccagccaagggcccacatgtaaaggctgggcctcaccccaaggcgtggggaaatacctcatgaattcatgaatacactaaattaacttgtcaactgggatttttttttttttttttttttttgagatggagtctcactgtgtcgcccaggctggaatacagtgatgccatctcagctcactgcaacctctgccccctgggttcaagtgattctcctgcctcagcctccagagtagctgggattacaggcatgtgccaccatgcccagctaatttttg[150 bp omitted]tttggggtttcactatgttgcccaggctggactcccaactcctgggctcaagcgatcctcccaccttggcctcctgagtagctaggactacaggcatgtgccaccatgcctggtgtgaattgggtttgaaatagggtctttcagagcctgacaggctccatagcaccccaagggccagcaaggggtgaggcaatagtcaccgtgggctgggactcagtgtcttctccccagaggcaccgggcctccctgcctctcatctcgcccctcccctctgccctccatggttgcagcttacagccattccacagctccctgcggctctgaggataaggccttgggtaccactctgggcattcaaggccctcaccaccctctgggacttcccctctctaccctgctcactggatccagccccatgagatacgccaggctgagctcgtgggctctttctccaccaggctcaattcctgtcttccagagctttcctcagatcctacctgagccctggtcccaagcagaaattgctccctccccagcccctctgttggcccaagtatgccagcaccctctcaggcggcacagcctggctattatctgcgggatttattaccagccttcctaagagcctgtcagcatggctgaaaacagcttgaaaaccaatgagccagcaggtgaatgatcgcgtacgacagatgcttcacaccagtctacactcctggggccggtgccaaccctgggaagaatcagtaaaaggcagctcccctctgggctgactcagcctcgagacaggacacgcattttggcaagcggagcacaagttgggtgtcagcctccacctggcccctgggccacgaatccttggatggtgaacaacctgtgcaactgttcaaggcagcccggcactcacatgtagcagaatcaaaagggagcttgttaaaaatatagttccctgggccccagtcccagagtttccaattcagtccactaggactggagcccaggaggctgcatttgtcagccagctcccccagtgataatgatacccagtcaggatggggacttggaacaaacagcccaattagtaatgataataatcatcatcctggtaatagctaactctcacatagcacctcctgtgccatgtgggaggctctattctcagcactgtgcatgttaattcatttaatccccacaacacctctatgagttaggtcccaccatcatccctactttgcagattttgaagctgagacacagagaggttaagcaacttgttcaagatcacacagcgagaagagagtagagtcagattcaaatccaggaagtctgcttccagaacacacccccttcaccgcatcactaaagcgcccctaaagccggcactcagtgagcggctgtcaacccttatgtagcccctaccacgagccgagcactgcccagtgcttctcacagactcactcatttcatgctcacaaccctacaaggcagatctcgctatcatccccattttccagatgagaaaactgaggctcagagagattaagaaacccccctaaggggtgttgagtaaatgaagtagggaagggaaggggaagggaggggagcggaggagagggcaagaagggagggaagggagaaagggaaggggggaggaaggaggtggggagagggagggaagggaaggaaaagaggaacaggaaggaagggagggagggaggggaaggggaggggaggggagaggaggggaggcggaaggaaggggaagaaggaagggaagggaaaggggaaaaggaaggggaggagagagagggagaaaggaaagaagggaggaagggagggaggaaggaaggaaggacagggagggaagggaagggaaagaaaagaggaagaatgggaaggaaggaaggacagggagggaagggaagggaaagaaaagaggaagaatgggaaggaaggaagggagggagggagggaggagagcatgacgcaggaacaatgcatgaaacagagacaactacagggggcctgacctggtccccacagcgcagggccgcaggaggcgtggcaggcgcatgctcaccttggaggcccgcaggcccatgaagatggcgaagagcagcagcagcagggaggtggccaccttgaggtcggttagcaccaccatgcccacgttgacgaagatcgccacgccggagactaccagcatgaggttgagcagggcgcgctgcagggtgggcgtgcgcaccttcagctccggcagcagctgctccaggccttccagcggcgtgtccttgaaactcttcagtaccaggtgtccccgtttggtccgggctgccaggaccacccgcttaaagtatctcctgagggacagagacagaggcaggagcaggatcgggactgcactgcccggggagccccctccaatcctaggacgctcactctggctctacagtcgcacaaccatcttaaaagcgactcagtaatcatggggaagaaaccagggatcagctgtgtccaaccacaggggatcggttcaatcgcgccatcgatccctggtattggacgtgcagattgtttgttggaatcctggccgtgccgcatcttcagaatgtggacctccctctccgagcctcagttttccttattggaaaatggggagaactgtccccatcctttctcttcccctgggaatcaagtgtagtactcactttcccttgagaagaaaagacagcatttggatgagtcacgcctcccatttctcaacttcccgcctggggcccagacacccaaaccagacactgacctgtcagtcccctcttgactctaaccttgctccctcttgctgcagctggggaacaagggccgcctcacctctccgcagggggcagcttggtgaagaagccacgcctggagcccacgctggacttcaggggcatctgcccgactcgctggcccagggcccagaagtgaatgtagacatactgatccaaatttactgtcacctgccggggggatgaaggaagcagtggcgggtgaacatgggcaggagtgttgagggcaggataccagaatcagatgtcctgcccctaaataattcccccgtttcccacttatccccattcaccatctaggcagggctgtcacatatggttgtccatgtcgtatactgcacaagggctcatgatctaacacagtgccattcacgtagaagtcatctttaccatatttcctagaatctaaggtgccactgactctacctgattattttatgaagcaactaaaaacaaaatacgttgccaattaaatgatgtcacaccaccacctgtaaattacatcccaatttcagagatgacaaaacatgactttggaaaaactgcagtttaaaatcactaaaatgtggaatttggggagattttagtattttttatttctgtttttatttttatttctattttgagatattgtctcactctgtcacccaggcgggagtgcagtggcacaatctcagctcactgcagcctccacctcctgggtccaagtgattctcgtgcctcagcctcccaagtagctgggactacaggcacccgccaccatgcctggctaatttttgtatttttagtagagatggggtttcaccatgttggccaggctagtctcaaactcctgacctcaaatgatctgcctacctcagcctcccaaagcactgggattataggtgtgagccactgcacccagctgattttagtatttcttataattttgttagcattttgcgtgcttttaggggcttggttttttttttcttttttaatgtgtctctctgtgtgtgtgtgttttgttttgtttttttgagacaggttctcaatttgtcatccaggctggagtgcagtggcaagatcatggctgacagctcactgcagccttaaactcctgggatcaaatgatcctcccacctcagcctcccgagtagctgggactgcaggcccgcaccaccatatccaactaatttttgtattttctgtagagacggggtctccctgtgtcgcctagatgagtccggaactcctgggctcgagcgatcctcctgcctcggcctcctgaatgctgggattacaggaatgagccactgaacccggccttgtattatattatttattattacaattttggcagatggtgctaagtctcttgccctaagagagccatatcatatgatacttttccaacagatggcagtgaagtgacctgagacagcagcacctcctttttttttccagatggagtttcactcttgttgcccaggctggagtgcaatggcacgatctcagctcactgcaacttccacctcccgggttcaagagattctcctgccttagcctccccagtagctgggattacaggcacctgccaccatgcctggataattttttatatttttagtagagatggggtttcaccatgttggccaggctggtcttgaactcttgacctcaggtgatccacccaccttggacccccaaactgctgggattacaggcttgagccactgcatccagccaaaagtagccccttctctgagttcaccaagtgcgccatatgggccacagtcccaggctcaggactacaactcccagcagcccatgcctctcagaggctctgccccaccctagaggcctcctgggagttttgttctcctagggagccaagtacctggacctcatcctgagggtggtggaccaccagcgcgtaggccagggtgtcctcagacagcggggagaagttggcctgggccagcaggggctccagagcccgaagcacctcctgctcattagacagacgctggggatccgttagtgatggctgatcgagggtctccctgtcagggttgatggggtcatataaggcctaagaggagagtcagagagaaaaagatgggataggtctctgcatgaaggattctagggacatctaaggacatccctctccagatactttcatttatttatttatttatttatttattttattgagatagagtctcgctctgttgccaggctggagtgcagtgtcacgttctccgctcactgcaacctccacctcccgggttcaagcaattctcctgcctcagcctcccaagtagctgggactacaggcgcacgccaccatgcccgggtaatatatatatatattttttgtattttaatagagatgaggtttcactgtgttgcccaggctggtcttgaactcctgagctcaggcaatatgcccgcctcggcctcccaaagtgctaagattacaggcataagcca[137 bp omitted]tgtctcagcctcctgagtagctgggattacagatgcacgccaccatgcccggttaatttttgtatttttagtagagaaggggtt[132 bp omitted]gatggagtctcgctctgtcacccaggctggagtacagtggtgcaatctcagctcactgcaacctccacctcccaggttcaagcagttctcctgcctcagcctcctgagtagctgggattacagacacatgccaccacattcagctaatttttatatttttagtggagatggggtttcactatgttggccaggctggactcgaattcctgacctcaagtgatgcaaccacctcggcctcccaaagtgagattacagacatgagccactgtgcccagcagattcttttcttatcacacccatatccaatcctctggcaagttcacttgctaaacccctgaatcttcttgaatccaccctcctctctatctcctttgctgctatcttctcactgaagccaccttcatctctcacttaaacaattatgtagggcttctgttccccaacttttactcttactactttctttttatttatttatttttttgagacagagtctcactctgttgcccagggtggagtgcaatggcatgatctcagctcactgcaatctccacctcctaggtttaagtgattctcctgcctcagcctcccgagtagctgggactacaggtgcccaccaccacgcctggctaatttttgtatttttagtggagatgaggtttcaccatgttggccaggctggtctcgaactcctgacctcaagcgatccccccacctcagtctcccaaagtggtgggattacaggcgtgagccatcgcacctggcctactcttgctacttttcaaccagtatccacatggccattgggaagaacttactgaggctgtaaacagctcccacaatccacccctccaacagcttcccactgtatttagaataaaatctagaagctttccgtgatgttcaagttccctcacaaactggcatctaacctgcctgcctcatcttatgtccctaaacgtcccccctaaaaaactcttggaatgaatgtcgcgtgagtttccagttgcctagcctattttgctcacggagagactgagtctcaggatgacatataacttgtcccagactctacaacagcctccaaggaaatcacccctctataaaaccagatcataaacctaaccctccatgtgtctcttgggagcaggggtcctatgaagcagcttgttcaggccaggtgcgattctgaattagtggaaggagagagggccggttctccaagtgggaggaatggcctaagtgaaggtttggtcatggggaagcccagggcctcagaaacaactgagcaaggagactgggatgcagaagagattcaaaggccggcacagtggctcacgcctgtaatcccaacactctgggaagccaaggtgggaggatcacttgaatccag[140 bp omitted]ctcccaggttcaagcgattctcctgcctc[135 bp omitted]gcctcccaacgagctgggattacaggtgtgagccaccgcatctggtcttttttttttttttaattagccaggcacaatagtgcatgcctgtggtcccagctacttgggaggttgaggttggaggataacttgagcccaggaggttgaggctgcagtaaaccatgatcgtgccactccactccactccagcctgggtgacagagcgagaccctgtctcaaaaaaaaaaaaaaagaaaaagagaaagagtcaagccaagaaaatcctcctctgaagtaagccctagggctgtgcccacatcctccagcctaggctggtcgagcagttctgggacttacagagtgaccttgagaaattccattcccaggctgagctgcagtttgaaagctggagaaagaaatctgcattgatcaaatgtccactgtgagccagattctcttctggaaacttcacatcctcccagggctttgggccaaaaacctggacattgcacgtgatccctgttgctcccttccctgtcacaataaatcctgccgattccaccttcaagcagaccgcacttcacccagctctctcctccccacccgcctggtcccagtccatgccagccaccaccatttcatcctgcctgggtgagcccaacagccttctcaatagtctccccaaatcctgtaacacacaccatcccctgccaatcggttctttacacagcttccagggagatctcgtcaaacaataaaataacaacaatcatcatcaatgataatggtgcacatttacatagcacttactgtgtgccaggcacagattgaagtatgttacacgcacattctcacagtgtgaaactcctcatttacagatgtggaaactgaggcacagagaggttaagtaattgcccgaggtcacatggccaggaagtggtgtaaccagaatgacacatttgaccatgtcaatctcctgctaaaaccctcccaaggcttctactgccctcgggaatcaggatcacacttcctagtagggcctgcaaggcctcacaggaccgtaaatcccctcggtcactccataccatccagactgtctttaggttggctgggcgcgattgctcatgcctgtaatcccagtagtttgggaggccgagagaagaggattgcttgagcccaggagtttgaaaccagcctgggcaacacagcaagatcccatctctaccaaaaaaaaatacatttatatatataaaaattagccaggcgtggtggtgcacacctgtggtaccagttactcaggaggctgagggaggtggattgcttgaacccaggagattaagtctatagtgagccatgatcacagcttggcactccagcctgggcaacagagaagaccctgtcttcaaaacaacaacaacgacaaaccagattggttttagttcctccagccacagagactttgcacatgctgttggaagactctctctacacccttcctgcctccttcccttttcaccattgaagtcttactctctgtcatattctaggtccatcatcactatcaaaaagcctcggacaggggcagtggctcacgcctgtaatcccaacaccttgggagaacaaggcaggaaggactgcttaaggccaggagttcaagaccagcctgagcaacgcggtgaaaccccattgctactaaaaatacaaaaaattagttgggcatggtggcgggcgcctgtaatcccagctactccggaggctgaggcatgggaatcacttgaaccctggaggtggaggttgcagtaagctgagatcgcaccaactgcactccagcctggacaacagagtgtgtcagtgtgtgagtctctggctcaaaaaaaaaaagcagcagccttcctctactcatcaaactgagcagggccaccctgtgtggttgggcaggatgtacactgcacaaagataccagatctaagggcagacctgtccatttatcatgacagccacccttcagatggaaataaaggaacagaatagcaccatccactagaactccctgcagtgagggaaatattctagatctgcaccatccaataaggtcgacactggccataggtggctactgagcacctgaaacatgatcagtatgctgagaaacaaaatttg[134 bp omitted]cctccgcctcccgggttcaagtgattctcctgcctcagactccggagtagctgggatcacaggagcccgctaccatgccagctaatttttttttttgttgtacttttttttagtagagacggggttt[141 bp omitted]acagttccaggctagagaaagaggcacctttttctaatttgcacatggaccccagtatagcaaccaaggttcaggttcactctgttatccccctgcagggcaccatgcccatcgccctcatggtctgaacttaaccatcactggggagagcatctgattcatgaccgtccccaccacccacgttcagctcccagagcgcacgatgcaggcccagtttcactcctcagtgaagacacagcacctggcaccgg[136 bp omitted]catggtgaaaccccgtctctactgaaaatacaaaaattagccaggcatggtggtgcgcgcctgtagtcccagctacttgggagactgaggcaggagaattgcttgtactcaggaggcggaggttgcagtgagccaacacagtgccactgcactccagcctgggagacagtgagactacatctcaaaaaaaaaaaaaaaaaaaaaaaaaagaatgacttaattgggtctttgtggcaattgctgctgccatattccaccatcaagcattcccttgtggctgtcacatgccatctgtctactgaggactcccagatttccatctgcagtccagatatctcgcttgagctccagattcacacggctgggcgtctactcaatacttccatacagatgccccatgggcctctcaacacctccgcaagggcatcctctcaaacccacgatgccccaaacctgctcctctcagccttgtccccatctcaaaagatgcaactccatccttccaggtgctcaggcccaaagcctgggggtcatcctggagtcttccctttctcacacatccaacccattggcaaatcgtgatggtaacacattcaaaacagatgcaaaatctaactgcttctcaacccttggtctcagccaccctcctccctggcctgggagctgttctccccgccccgtccccatccccagtgggttccccaagcagccaccagagggcgccagtttgcacctacagcaattccagtctttgcttagaacactctgcttagccaccgacccactcagtcaaagcaaagtcctcaccaccgcccaggggggccctgcaagatctggccccaggtccccctccctctgccctcacctcctctctcttccctgggtcgccaggctctagccccgcaggcctcctggctgttcctccacacaccatgcacactgctgccccagggcctttgcacgtggagttccctcacatctccatagggcttgctcccctctccttcaggtctctgctcaaatgttctctgctcagtgaggccttcctgaccaccttacctgaaactgaaaaacaccccctcccttgctttccttttctccttattaggttttgaaaaaaagaaaaatacagtcatcccttggtatccataggacatcagttccaggatgtcccatggatacccaaacctacagatgctcaagcccctgatataaaatgacatgtctgcagccgggcgcggtggtttacgcctgtaatcccagcattttgagaggccgaggcgggcggatcacgagttcaggagatcaagaccatcctggctaacatgatgaaaccctgtctctactaaaaatacaaaaaattagctgagcgcggtggtgggcgcctgtagtcccagctactcgggaggctgaggcaggagaatggtgtgaacccgggaggcggagcttgcagtgagccgagatcaagccactgccctccagcctgggtgacagagtgagactctgtctcaaaaaaaaaaaaaaaacaccatatctgcatataacctctacacatcccctcatatactttatttttatttttttagagacagggtctagccctgtcccccaagctggaatgcagtgctgcaatcatgacttactgcagcttcaacctcccaggctcaagcgatcctcctgcctcagcctcccaagtagctgggaccacaggtgtgtgccaccacgcacagttaattaaaaaaaaaaaaattatggaggccgggcacggtggctcacacctgtaatcccagcaccttgggaggccg[133 bp omitted]tgaggcaggagaatcacttgaacccaagaggcagaggttgcagtgagccaagatcacaccactgcactccagcctgggcgacagagcaaaaatctgtctcagaaaaaaatatatatatattttgtggagacagagccttactatgttgtccaagctggtctcaaactcctgtcctcaaatgatcctcccacctcagcctcccaaagtgttagagttacaggcataagccactgtgcctggccacgtatactttaaataatcatctctctctagattacttataacaccaaatacaatgaaaacattatgtaaatagttgtaatgctacattgttcagagaataatgacaagggaaaaaaagagtctgtacatgttcactactgatgcaatttttttcccaaatattttttatccacagttggttgaattcacagatgcagaacccatggatatggagggctgactgtgcaggacaccacttacatctgaatttcagatcaacgacaaactttttttttttttttaaacggggtctcactctgttgcccaggctggagtgcagtggtgtgatctcggctcactgcaacctctgcctcctgggtgcaagcgattctcctgcctcagcctccacagtagctgggattacaggcgccagccaccatgcccagctaattttttttttgtattttagtagagacgggttttcaccaggttggccaggctggtctcgaactcctgacctcaagcaatccacccgccttggcctcctaaagtgctgggattacaggtgtgagccaccatgcccggcccaacaacaaacgatttttttagtttaactacatcccatgcaatattggatgactgtattgcataggacacacttccactgtactaaaaaattacacatagtttatctgaaattcaaatttactgggtataatgagttgaatgttgtcccctaaaaatttacatccctttggaacctcagaatatgatctcattcggaaatagggtctttgcaggtagaattaaggtaaagatacagatgagatcatactaaattagggtggaacctaaatccaatgagagtgtccttataagagacagaaaaggacacacataggacaccgagaaggcagccacaggaagatggagacaggggttggagtgactcatctacaagccaaggagcaccaagggttgctggcagctacaggaagccaggagagacaccatagatgcttccctctcagggcctccacaaggaaacatcttttaatacatttcacttcttttttttttgagacatagtctcactctgttgcccagactggagtgcagtggtgcgatcttggctcactgcagcctccgcctcccgggttcaagtaattatcctgcctcagcctccggagtagctgggatcacaggcatgtgccaccacacccagctaatttttgtatttttagtagagtcggggtttcaccatgttggccagattggtctcgaaatcctgacctcatgtgatccacctgcctcggcctcccaaagtgctgggattataggcgtgagccaccgcgcccagactttttcttttttttttttttttttgagacatagtcttgctctgtcacccaggctggagtgcagtggtgcgatctcagctcactgcagcctccgcctcctgggtgcaagtgattctcctacctcagcctcccgagtagctgggactataggcacccgccaccacacccagctaatttttgtattttcagtaaagatggggtttcaccatgttggccaagctggtctcgaactcctgaccttaagtgatccgcccacctcggcctctcaaagtgctggaataacaagcgtgagtcactgtgcccggccaaatttcacttctgtaccttgttgctggtctcttcctcagtagaacagagcctgtgaggtacatctctcatgctgtccactgtctcccagagcctcaagccattccagagacacagtaggtgctcaataaatatttactgagcgaactcaatgaatgaatgaatcagcgaaaaaagatcagagagaggtcacccgccaaggtcacccgcaccactagtgaacaaccaagctattgtttgaaccgaggctatgctgcttctttccctgcccaggccacatcttcaaaggacttaagtcatcagcaaatggtcacccagcgggcctcacccgcctctgccacttctaccctgcccctgcctctgtttaaaatctcctgcctgggagatatatgcttattcacttatgttctttctacatttctatatatttatacatttctataataaaataggctttttttaactttttttttttaagaatcttgctctgtcacccaggctggagtgcagtggcgtgatcttggctcactgcaacctccacctcccgggttcaagtgattctcatggttcaagtgattctcatgcctcagcttcctgagtagctgggactacgggcaccccccaccacaaccgactgatatttatatatttagtacagacagtttcaccgtttgccagactggtctcgaactcctgggctcaagtgatccgcctacctcggcctcccaaagtgctcagatcacagacaagacataccaagcccagccttaacttttaaaaaaatagaaaaagaaaaaaacaaccgtggctccagaggccataggtgccctgtggaagagcttggaggcaggcagacgggggcttgatctcgactccaccaattatgaactgtgtgatcctgggcacaacccgggccctctgagacattcagtttctccatgtatgaatgggctgatggcggctgtctctccgcactgcaggaaggagtcaataagccagacacagcaagcgctcagcaacaaggggctgtgatggccactgttgctggggttgttattattcaaagcaaagtgcggagctgcagaaggcagtggtgggatgtggcgaggggtgaatgcagcaggcctgggttgtccaaaccccgcacattccaaagaaaggaccggccctggaccagcttctgggagggaacctctaagcccttggaatgtcctgactgataagagtgtcttggtttacctggggcctggggccacactggatgctgtgtgttaatgttgtcatctatggtcagggcctggagccactgagcatcagtttgacctcggaggggctggagtctcaggtcagccaccatgcatatgtgactgacccccagtaaaaaccctggccacccaggcttacaggagcatccctggttggcagtactgcttgcgtgttgtcacacatcttgctgggagaattaagtgccgtccatgactccaccgggagaggacagctggacgctcacgcctggtctgtcttggattctgccccatgtgcctttttcctttttttttcttttttttttttgggatggagtctcactctgctgcccaggctggagtgcagtggcacaatctcagctcactgcaacctccgcctcctgggttcaagtgattctccttcctcagcctcctgagtagctgggattacagctactgggattacagcgccactatgcccagctaatttttgtacttttagtagagacagggtttcacc[133 bp omitted]ctctgtcacccaggctggatagtgcagtggcaaaatctcagctcactgcaacctccgcctcctgggttcaagcgatctcctgcctcagcctcccaagtagctgggattatagacatgcgctaccaggcccaggtaattttttttttttttttttgagatggagtttcactcttattgcccaggctgcagtgcaatggtgcgatcttggctcactgcaacctcctcctcccaggttcaagcaattctcctgcctcagcctcccgagtagctgggattacaggcatgcaccatcacacccagctaattttgtatttttagtagagacgg[145 bp omitted]ctcactctgtcacccaggctggagtgcagtggcgcgatctcggttcactgcaagctccgccacctgggttcaagcgattctcctgcctcagcctcctgagtagctgggatgacaggcacatgccaccacacctggctaatttttgtatttttagtagagacggggattcatcatgttggtcaggctggtaatttctgtatttgcagtagagacagggtttcgtcatgctggcaaggctggtctcgaactcctgacttcagctgatccacctgctttggccacccaaagtgctaggattacaggcgtgagtcaccgcgcccggcagtactaccatctattaatagatcctcccacagcagtttctcagcccagacctctcccttcacctccagatccacatattcaagtctatctttctttttttttttttttttttttctgagacggagtctcactctatcgcccagctggagtgcggtggcgcaatcttggctcactgcaagctccgcctcccgggttcacgtcattctcctgcctcagcctcccgagtagctgggactacaggcgcccgccaccacgcccggctaatttttttttgtatttttagtagagacagggtttcaccgtgttagacaggatggtctcgatctcctgacctcatgctccgcctgccttgtcctcccaaagtgctgggattacaggcatgagccaccacgcccggcctcaagtccatctttctacctgcctttctaaaaggcagctcaatggataaagaaaatatggtctatatacaccatggaatactactcagccataaaaaggaacaaaataatgtctcttgcagtaattggatggagttggaaggccattattctaagtcaagtaactcaggaatggaaaaccaaatagccgtattctcactttataagtggaagctaagtaagctatgagggtgcgaagatacacagagtgatataatggaatttggggactcagggaggggggttgggatgggggtgagggactacatattgggtatagtgtacactgctctagtgatgggcacaccaaaatctcagaatgcaccactacagaattcatccatgtaaccaaaaagcacatgtaccccaaaaactactgaaataaaaaatgttttaattaaaaaagaatgggccaggcacggtggctcacgtctgtaatcccaacactttgggaggccaaggcaggtagatcacgaggtcgggagtttaagaccagcctgagcaacatggtgaaaccccatctctactaaaaatacaaaaattagccaggcgtactgacacacgcctgtaatcctggctattcgggggactgaggcacaagaatcacttcaacccggaagacagaggttgcagtgagccaagatcgcaccattgcactctagcctgggcagcagagtgagactctgtctcagaaaaaaaaaaaaatatattagaataaataaattcataaataaatggtagctcaaattcttaagtccaaaactgagctctcagtcctccctgcagatctttctccccatcccaccacggtctcccccatcccagtaaatggcagctccatcctccaggaggctcaggccagaactgctggagacgcacccctactcctctctcttcctccccagaacacccccacagccagcacatcagcaaaacgctgatgccttccaacataaccagcatctgaccgtttttcaccatttccatcgctattacccttgtcggagcttccattatctctcccctagacaaatataatagactctttcatagatgtccctgcctctgatagtctgttccctacactgcagccagagaaatcctgttaacacctaaatccgctgctcacatctctcctcagctcagagccctcccatggctcccggctcactcagagtcaaagcaaggtcctcggcctggcacagtggctcacgcctgtaatcccaacactttgggaggccaaggcgggtggatcacttgaggtcaggaattcaagaccaccctggccaacatggtgaaacccagtctctacaaaaagtacaaaaattagcagggggaggtcgtggacgcctgtggtcccagctactcaggaggctgagggaggagaatcgcttgaactggggaggcggaggtttgctgtgagctgagatcgcaccactgcactccagcctgggcaacagaacaaaaactccatctgagaaacaaaaacaaacaaacaaaaaaacaaagcaaggtcctcacagtggcccacaaggcccagtacgatctgtccccatcccctctgccctcatatcccaccctccccgcacattcactctcctgcagccacagtggcctcctcactgttcaatactccaggcctccactcacctcagggcctttgcacttgctcttccatctgccaagaacatcctcccccaggcattcatcaggctcgttccccctcttcactaagcctttagcccacatgtcacctccttggggagcccttccccacccaccccgtctgaaacaggccccatctcacccctctttgttttttttttttttttgagacagagtttcctcagtcgcccaggctggagtgcagtggcgcaatcttggctcactgcaagctccgcctcccgggttcatgccattctcctgcctcagcctcccgagtagctggaactacagtcgccccccaccacgcccagctaatttttttgtatttttagtagagacgaggtttcaccg[139 bp omitted]tggcacttatcaccaccaggcatcatattttatatttatttgattccttgtctccccacttggaatgttggctccatgagggcgtcacttcacctgtcatgttcactattgaatccccagcacttaaaataagggccaggctccaagaaggtgtcagggaatgtttgctaaatgagcggatgctcgaacaagcaccacagggctggaagggccccgtcctcacctgcagccgggccaggatttggtggtagtggaacagggtgcagaagtccacgtgggccgagaacgcctccaaagccgccttctctgccggactcgagtggaattcctgttacctcaggaagcaaaacttctctgtaggccttttccccttccccgagggaaagaattctttccctggctgcctaactacacaatca[132 bp omitted]aaatcctgtctctactaaaaatacaaaaattagccgggcgtgatggcatgcacctgtagtcccagctactcaggaggctgaagctggagaattgcttgaaccagggaggcggag[131 bp omitted]gccaaatatagtgaaaaactatactgggcttaaaaagctggaggttcaagtttttgctttgacatttcctagccaatacacacacacacaattccaggaacggtttgacagtgtaatatcatcctccagaagtagatggaattattattattattatgttgagacagagtctcgttctgtcacccaggctggagctcagttgtgcaatctcagctcactgcatcttcaacctcctgggatgaagcgatcctcccacctcagcctcctgagtagctaagactacaggtgcccaccaccatgcctggcgaatttttttcaattttttgtaaaggtggagtctcactatattgcccaggctggtctgaactcctgtgctccagcaatcctcccacctcagcctcccaaagtgctgggaggctgagccaccatacccccaaggttgatggaattataactcccatttgtcagtgggagaaactgaggctctggaaaagtcatttggtaagggctgcagtgtctgtgggaaatgactgctatctaggcctgtctgactccagggtacacattgaaccatttcctttttttttttttttgagaaggagtctcactctgttgccaaggctggagtgcagcggccatgatctcagctcactgcgacctcttcctccacggttcaagcaattctgcctcagccttctaagtaactgggattataggcgcctgccaccacgcctagctaatttttgtacttttaatagagacggggtttcaccatgttggccaggctggtctcaaactcatgacctcaggtgatccacctgcatcgacttcccaaagtgctgggattactggcgtgagccaccatgcctggccttgaaccacttcttcttctttttttttttttgagatggagtcttgctctgttgcccagactggagtgcagtggcacgatctcggctcactgcaagctccgcttcccgggttcacaccattctcctgcctcacctcccaagtagctgggactacaggagcctgccacctcgcccggctaattttttgtatttttagtagagacg[148 bp omitted]attgtcttcacttctctgagcctcagtttcctcactggcaacagaggattacacgctctttcttggagggctacggtgagaatttgatgagattacacatgtcctatatacacatgtgtttacatatatgtgcatatatttgtatatttatgtgtgtatatttgtgtacttttgtgtgcatatatttgtgtgtgcgtgtatttgtgtgtgtgcatttgtatgtgtatatttgtgtatttgtgtacacatatttgtgtatttgtgtgtgtacttgtatgcatatacttgtgtgtatttgtgtgtgtgtatttgtgtgtgtatcaagtccagcacagaattgagtacatacagtaggtgttcagtaaataaatgttaaattaatgaatgatggtgaggtgtggtggctcatacctgtaatctcagcactttgggaagccaagatgggcagatcacttgaggccaggagttcgagaccagcctggccaacatggcaataccctgtctctactaaaaatacaaaaattagccaggcaagagtcccagcctctcgggggctgaggaaggaggatcacttgagtctaggaggcagaggttgcagtgagctgagattgtgccactgcactccagtctgggcaacagagtgagaccctgtctcacaaaaataaataaagaaaaataaatgaataataatcctcaaaatcctcaataatgacaatgatgatgatggtggcaataagacctcaggttctagagtgagaccaagactaggatgaggtgaatatggcacccaagggtgcaaaatttaacggggcactcactcttagggtcaagcgagtgccctacttgcctaaccctagtcctgggccagctctggagtcagaccactttggttcaaatctaagccactatgttgtggccttgggtaagtcactttccttccctatgcttccattatctcatctgtaaaatggggatgatggtggtatctctcttactgatgattcaacaatacatgaaaaatgtctggcacagtgccatggagtcagagctcaaattgtgtgataataattatgattacagcgttgtgactttataggtacaattattatcaggtagtagaaatagtaatgatgaggatgattactatacccatcttaaagagggaaaaaccatgccccagagagtgcctgttcaagccctcagaacaagccagagttgggaatggatgctgcgtctgcatctcggagacctggctcctgcattccagctcatctcccgcccactagggaaacacgaagggacccgggaactacaactcccaggaggcgccagggcagctctctgcagcaactagggccctgccgccgcgaagcctgctgggagccgtagtccccaggctcttgggcctgggacaggcggtacctgtattaggaggcggagcagctgctccttggagaagggaatgaagcgctcgcggtactgctgggcccagtcgcggggctccctggggttccacatcttgcgatactcccccattttggctgccagcgatgagagggcccgggggggcccgaggagcgcgggcaacagtggccatactcggaccctggacccccagaccccccgggtcacatgcagcatggctagaccctttccccggagcctaaacagaggaaaatgggcaggggtcaaaggccatctagaggaaaagcgccctctccacctccacgtcccaccctccagaagccgtctctaccccaggcagggcgcagagcccatccgctcgcctcaaagcccctgttgcctgtccccttcccacactgctcagttggcctgggtcccagacaggggtcagaggtcttaggttctggggcgtttttcaggcccagagaccctgtagtggtacaacgtttctttggggtctagacagcgaggtagatcttaggagagcaggaaatgctcgtaaaggttacctagggggtgcagggccgccctccctggccatgcaatcccccgatttctccctcaccttagccaaagctcgactgtcattgagcctcctgcgcatgtgcaggagggcgtcctgggctcccgaggttcggcttcacccagcagtaaaacgcatgcgcaaagcttcggtcaatgcgggctgtccatttctcaccgccgactccctacatcaactacgcatgcgttgcctgcctttctccaccgccggcctcgtttgggcgcgacgcatgcgccgcaggagtgtctccttgtcagcttgctacaaagggaaggggcggtgtggacgcgagactccctagagggatggggcggggtagggctcccgcgcgcagtccgccaacggcgcgcagtccaacgttcgccgaggccacgccccggctcgtgtcagctcctgagtaggcggaaagagggagggggcgggacttgggcgcagccaatcagctgtggaggagcgaaaaggcgggaaaaagcggaaccaaaagaaggctgaggtggcgctagggaccaggaggggtgggggtggcgaaaggaagggcgggccctcaggtgacgcagattggccctccagagaaggggcggccccttctcaggtgccgtcacccccaaacctcagcactgccattccaggtccttaaaggggagaccgcgattctaagaaggtagcccagtgccggggcgtggcctcattctgaggttccccacaaatccgaggtcccgactcccagcttgaggaggtgcacttccgtgaaaatggagctgaattcgaaagggaggcccttattctgggaaatggccccaagtgacaaggacagcctgaaatatgccctgagatacctgggttctccacgaagggtgctgtcacccccaaacctgaaagggattattcggtttcagacctcccaggggctctgatctcaatggccgcaccccctagtccccagaaagtcccacctgtgtcctctcacagaaggacccagtccctctgcaggcccttcagctcctgggtcacaagacgtggtccccaaatatcccagccctcccctgcactccacctctgggatccctgacagccctctcgcccaacaaccccctcagcccacattcctgacttctggaacctgaagcagccccttcacttatgtcccccactcctgggacccccagaatcaccctcaccccaggccctcacctctctggaatcctccatagacccccttaacccacacctcaacccaggggacccttagcgactctctcatcctgcacctccacctctgtgacccctggcagccctccccacacgacaccttgcctgggacccctagtatccccatcctatgcccccctctcctgggacccccagaaagctccctcaccacacacaaccccattcctgggaacccccagcacccgcatcctatgtcccccacttcagggacccctagcagccctctccacacaacacctttcctgggaccccccagaacccccatcctatgcctcccacttctgggacccctagtagccccctcaccacacaaccccattcctgggacccccagcacccccatcctatgccccccactcctggggcccacagaagccccctcagcacacacaacctcattccctgggacccacctgcacccccatcctacgtccccgacttctggggcccctgacagcccattcaccccacaccctgactcctaagaggctcagcagtcccctcaccccacacaactccattccggggaccccccccatccccaccccatgtcccccaatcctggggcccccaacagcccttccaccccgtgcccctgactggcatcccccatctgtgtcatcccacagcagccaagcccagggctggcctgaagcccccggacggcagtgcccagcaggcagcgcccagcaccctggctcccacctcccagtggccccaaaggaaaacagctgccatgcacatccccaaaagcctccaggagctggccaacagcgaagccgtgcagtttctgagaaggcccaagaccatcacgcgggtcttcgaaggggtgaggccctcccatggcccgactgtgcccctgggtgacaggagccaggagctctcaactcccagacacagtgcgggagatgggaggacaaggaaggggtcagacggggaaacaagacaacggagcaaatgctgacaccaccttttcctgagcaccccactataggccctatgctattgaggcactgatggactctcatagtaaggaacagccctcacagtaggtgctgcaagtcccatctctgagataacaaaactagggcttagaaaagttaagtaaattttttttctttgaaacaatcttaattagccaggcatagtggcacacacctgtaatcctagctactgaggaggctgaggcaggagaatcactcgaacccgggtggtggagtttgcagtgagtggagatcataccactgcactccagcccaggcaacagagccagactccatctcaaaaaaaaaaaaaagaaaaaagaaaagaaagaaacagtttcgctctgttgcccaggctggagtgcaaaaagcagtggcgtgatctccgctcactggaactccacctcctgggttcaagcgattctcctgcctcagcttcccaagtagctgggattacaggtgtgcgccactgcgcctggctaatttttgtatttttagtagagatggggtttcgccatgttggccaggctggcctcaaactcctgacgtcaagtgttctgcccacctcagcctcccaaagtgctgggattataggtgtcagccaccgcgcccagcctaagtaaattttttaaatctgggatgtccagtggggtagccacagccacatgtggctacctcactttgcactaattaaaataaaagtccattcttcactcacagtggccacattttaggtgctcaacagccacatgtggctggggactctcatattagacagtacaggctgggtgtggtggttcatgcctgtaaaaccagcaccttggtaggccaaggcaggcagatcatttgaggtcaggagttcgagaccagcctggccaacatggcgaaaacccatctctactaaaaatacaaaaattatccaggcatggtggcgcaagcctgtagtcccagttacttagggggctgaggctcaaggatggcttgagcccatgtggcggaggttgcactgcagcctcggtgacagagtgagac[135 bp omitted]cccatctctactaaaaatacaaaaaaattagctgggtgtggtggcaggcgcctgtggtcccagctactctggaggctgaggcaggagaatggcgtgaacccgggaggtggagcttgcagtgagccgagatcacaccactgcactgcagcctgggcgacagagcgagactccatttaaaaaaaaaaaaaaattagtgcagatatgggacattttcatcatgccagagagttctattagacagcattggctaaggtcacgcagtaacaggcaggggcaggattcaaactcagatctgtgagatgccagagcccatttattttccacctcccagttgagggaggaggagaaggagaggaacaggggctggggcttctaggaagagaataaggagtgcagccctgaagtgccagatgttgggtggtaaccgtgtgccaggcaccatgccaccgttcatttcatcatccccacactcctgaagaatctggacacctggagtcaaatcctcattcagcccagactttgctgtgtgatcttgaaccaatcactgttcatctctggatctcagtacatgaagggttagggctgtggctctgacctttaacctgtgctgcttccaccactccgctttaacagaattggaaactaaggcccagggagatgttgagacttgatcgaggtcttaggagtaggtggagttccccggctcagacccagggtctccacccccagagtgctaatccagagtatctcctctctgccccttctagagcctgagcttggagaaggaacaaacaggcctggaatcctggctcaggcacgtgctgtccatgcaaagtggcatactgcccagtttacctgggccaggcctgatgtccttaccagcagcagcaactttctttctcaaaagtgcccctttggtttgatggcttgcctggtcaccctgtgtccgtgtgaccctgagcaagctatgtgatttctctgaacatctccttactctcgtctgtaaaaagaggatcctaataatctactcctaggaagaatcattgtgaaaatgtaacaaattaatgcctataaactgattagcatgggccaggcaagtagtgatctttccttagtgatttttttttctttttctttcttttttttgagacagacccttgctctgtcacccaggctggagtacagttggtgcagtctcagctcactgcaactttcgcctcctgggttcaagcaattcttgtgcctccggagtagctgggattaccagcgtgcaccaccatgcctggctaatttttgtatttttagtagagatggggtttcaccatgttggccagactggtcttaaactcctgacctcaaatgatccacccgcctcggccttccaaagtgttgggattacaggcgtgagccaccgcacccaggcttaaatagtgattattatcaaaacaaatcattaccgtgtgtgaggagagggcctaggatgattgagatttgtgtccgttgtcctcccccagggaaagaggggaatcttgaaaaccgcatcccagcaccagatctttcgctggtgttagtttctctactcctcaccacaaccctgtgacacaggcattatgatccctgtttaacccaaggggaaactgaggctcacagaggttgagtggcatgcccaaggacatcacccagctggtgagcaagtccaactcggatccacccacctatctggaaagcctcggaaggcagggcgggtggcaaggagacggaagcccagctggtgtggactggtgcggggaaggaggaggaagagccgccaaccatgccagacgttctggtcacggactttgcccgccgcctccttccaccgtccctacccccccgccctctcctccttcccccctggcctggctcctcagtagggagtctctgggcagctggtgctcttgtcctcgctgccgcctgccagctggtgccttaactgataaatctttgctccctccctagggacaggccagggagggcatggaaggagtttggactgaagcttaagagggatagggtccctctagcccagatgagcccctgctcctcaaatctccagtgtcccgggctcatgtcacagcccagggttttgggggtcagtggacagacagcccaccggcctagatgtcaggagggctagattccaatccccctttcaccacttactgaccttgagaggacgccttccctctctgggcaaatcacaagaatgaccattttcctgagcacctactagagccaagcccctacccccacattcctccttttcatagcatagaaacagaccaggaaactgaggctccaagagatgagtgatttgccccaggccatacagctggcacagtcagaagcatctggctctttccactccaccaaaatggcttcgatttatcacctgtgaaacagaaatgaattaataatctccaccacgtggggccggtgtgaggttccagggaggtaacgcaggtaaaatgaatatgggctcaaaaatgatcaatgtgctttcttgtcctcgacctgactctgcctcagaccagcagggccagacacaccccctctacagtcagttcttctgctccaaaatagggagaatcatcttacagcctccctccaagggttgctgtgcagatcaagtgagatgatggatgtgaatacccttggttattgctgaagggctaggcaaaaacagggagtcagggtgttgctgctgttgttgttcacagaaggcaattaaggcaaaggagaagggaggatggacggaagctcaggagtttaggggtccgttctttgcctcctccatctccactctgaagggcagggcaagagtcaagacaagccaaagccattcactctttcaacacacatttgctgaagtccagtctagcgctgggtgctggggatagagagcaggggcccggcaaggtggctcacgcctgtaatcccaacactttgggaggccaaggcaggaggattgcttgaggccaggagtttgagacccacctgtgcaacatagcaataccgtctctacaaaaaattaaatatgagtgaggcatggtatttcgcacttgtagtcccagctactcaggaggctgaggtgggaggattgcttgagcccaggaggtcgaggctgcagtgagccgtgatcacgccactgcactccggcctgcaagacacagtgagacactgtctcaaaaaaagaaaaaagagagagagagtcctgtgtggagcctatccaggaagagttccaattctaacgaaggggagattttctttttcttctcttttgagacagggtctcactctgttgcccaggctggagtgcagtggtgcgatcacagctcactgcagtccagacctcgtgggttcaaatgatccttccgccttaacctcccaaagcactgggattacaggcatgagccaccacaccagaccaaagagaagattttcaacagtctgtttcccttagcctacccccgccatccccaacccctatcgccaacactgccacttccaatcaatcaccaagtcctattttacacgctaaatattactgaattccccagggctctggcctcagcctttctcacctgggcctccccgcctcctctcaggtatgttggcctcttgtcttgcccacctccgatccatcagccacgtgaccccagagggcttctctaaccccaaggctgaccccagctgtcccctgcacagaatcctcccatgcataatattgaatgctttccatggctccccaagtccggctcctggccctggtgttccgggcctcttagagcctggctcccacccacttttccagcctcatctcacaccagaaccctccagtgagtttctctcttatctctgaaactgcccgctctgcagcatctggcttttccacatgccatccaccctgccgggaatgcccttcctcctcttgtctgtctgagaaactccttgttctttaaggtccagttcagaactcacctgaaatccagccctcaatctggcttccaccttgactctctcccccaccccaggccccagcctcctccccaccaccccatctacacaccagctcgtctttgtctggcacagacctgccctgctgcattgtgaccatctgggacaaatcactggggcttcaaattttcaccgaatttcgttgataggagcccccgccctcaaggcgcgtggtccagtgtgaggaagaagagcaagaggtcaagggcagactcagaagccaggctacttctgttcaaatccaggctctgacactgaccagctgatttttttttttttttttgagacagggcctcactgtgtcacccagcctggagtgcagtggcacaatcagggcttactgcagccttgacttctgggtctcaagtgatcctcctacctcagccccccaagtacttgggactacgggtgcatgccaccacactgagctaattttttttttttaagaagttttggtagatactaggtatcactctgttgcccaggctggtctcctgagctcaagcgattcctcccaccttggcctcccaagtgttgggattacagatgtgagccactgtgcttggccttttgtttgtttgttttgagacagagtcttgctctctcgcctcggctggagtgcagtggcatgatcatggctcactgcagcctcaacctcctgggctcaagtgatcctcctgcctcagcctcccaagtagctgggactacaagtatgcaccaccacacccagctatttttgtttttaatatttttgtagagactgggtctcgctctgttgcccaggctggtctcaaactcctggcctgacacgatcctcccatctcaacctcccaaagtgctggaattacagtcatgagccacctcgcccagccactggccagctaattggattcggccaactccttatcctctctgtgccccagttccattatctgaaacacagggctgtgagtagtgcccgtgtcctagggtggctgtaaggatgacctgggtgagtgtttatagagtgtt[224 bp omitted]gctgaggcaggagaatggcgtgaaccccgggggccggagcctgcagtgagccgagatggcgccactgcactccagcctgggtgacagccagactctgtctccaaaaaaaaaaacagacgagagggacagggttaccagatcagtgtcgtagtatttgtctaaaacaaaatcccgaagccaaaaaacaaggcaaaatgttaatatgtgttagtttggccaggtgacactgggtgtttcttatgtttctcttcgtatttttctgtatgcttggactatcttgcaaatgaacctaagaaattaataggaattagtgaggccaggagggaagagacagaagtcgcagagggaagggctctaagtgcctcctctcgtttagtcctcagaaccaccccagagggaagagctgagaggcagagagaataatcacgactgcaaacactgattcagctcttcccatgtcccgggcactgtgccaggcattttatatgggtacctgggtttggtggcagaaggagagtgtgggggaggcaggggtgagtgaggagagatgaaattggaagagtgagggaagcggagactctgcagggcctccaaggccaggcttcagggctgggactcagtcctgaggcactggggagccatgaggggctgtggcagggaggggcagggtgtggaaagactcccctggggccatggtggagatgtgctgaggtggggaagactggaggtggggaggctgggaggaggctggggcaagggccaaggagagcagacgaggcctgagccaggatggagcagaggggacgaggggcaggaagctgagggctctgacactgtgacaatgtcaaagagggagaggtccagacggaccagtgactgggtatacggaaagaccgacagcaccagggaggaaggaggagcagcttcagggagagactgagctcttctctggcccctggaaatccacaggtcttctccctgatcgtcttctcctccctgctgaccgacggctaccagaacaagatggagtctccgcagctccactgcattctcaacagcaacagcgtggcctgcagctttgccgtgggagccggcttcctggccttcctcagctgcctggccttcctcgtcctggacacacaggagacccgcattgccggcacccgcttcaagacagccttccagctcctggacttcatcctggctggtgagcccccaggacccccaacccagagctgcccctcctcccgctcacagccctcctggctccccagggcctcccgggcacaacccttcaccacctagccggcctccaccctgactgtcctcccagtaggaggcatctgaccacaagtggcccagagcttctcactgtgcctggcacctgctgtctcctcctggggaattatttttatccttcagaccctgggtaagggtcacctcttctgacccccagacaaattatagcagcctcccttctgccccgtgccttctttgcatttgcttccctcatttacagaaaatctctcttttttttttttttttttttgagatggagtctcactctgtcgccaggctggagtgcactggcacagtctcggctcactgcaacctccgcctcccgggttcaagcgattctcctgtctcagcctcctgagtagctgggattacaggcgcacaccaccacacccggctaattattttttgtattttagtagagacggggtttcagtg[137 bp omitted]agcctggcataagcaagcacaaaatgtgtgtccttctttggggcctgacctccttcctctcagtctgtttgatctcaactcctccccaccctgccgctcctcctccctactgggccagtcccagtgacttagggccaagggagccttagaaggtcatcgaatctagtgctgtgcaggagaactccctgtgagggtggaaatgttctgtccctgcgccttctcatgcaggagccactgaccacccgtggctattaagcacttgaaatgcagctgctggccggggacggtggctcacacctggaatcccagcactttgggaggccaaggcaggtggataacttgaggccagaagtttgagaccagcctggccaacatggcgaaaccctgtctccactaaaaatacaaaaattagctgggcagggaggcgagtgcctgtagtcccagctactcgggaggctgaggcaggagaatcgcttgaacccgggaggcagagcttgcactgagctgagattgcgccatggcaccccagcctcggcaacagagcgagactctgtctcaataacaacaacaacaaaaaaagaaatgtggccagtgcagctgagaaacattttttttttttttttttgagacagagttgcgctctgtcgcccaggctggagtgcagaggcgcaatatcagctcactgtaacctccgcctcccaggttcaagcgattctcctgcctcagcctcctgagtagctgggactacaggtgcccgccaccgtgctgggctaatttttgttttttcagtagagacggggtttcgccatgttgcccgggctggtctcgaacacctggcctcgagtgatccacttgcctcagcttcccaaagtgctgggattacaggcgttagccacctcgcctagcctaaaatcctgtgttaatgaatagaaatttaaaccgctgcatgaggccggcggctcctgtattagacagcgcaactctactccagcagctcactttagggaaggctaggagggactggggaatgacttgtgggagatgtgtcaacatagaagctaataaaaaaagtatttttcaatacctcgtggaagttcgtgcagcaagaccaccagccccatccttcccatgcctcagcagccctgcctgagtgagctttccccctgccccttttctctccctgtgacgccacagttctctgggcagttgtctggttcatgggtttctgcttcctggccaaccaatggcagcattcgccgcccaaagagttcctcctggggagcagcagtgcccaggcagccatcgccttcaccttcttctccatccttgtctgggtgaggacaagcccctccaccacccctccctaggagggcaccctctgcagggtggggttgaaagggctagaacattcctgctctcacttagctcccctgggggtcaggggtcgggggttcccccaggactccactggtcccttccaggtgccgcttcctctgagcagccacagcccagcatcagggcctgtgctttggcctagggctcctgggcagtgagcagtccaaacaccggtatcttttgtctccttcccaggccagtccccagcccagtccctctcctgacctgcccagcccaagtcagccttcagcacgcgcttttctgcccacagatattccaggcctacctggcattccaggacctccgaaatgatgctccagtcccttacaagcgcttcctggatgagggtggcatggtgctgaccaccctccccttgccctctgccaacagccctgtgaacatgcccaccactggccccaacagcctgagttatgctagctctgccctgtccccctgtctgaccgctccaaagtccccccggcttgctatgatgcctgacaactaaatatccttatccaaatcaataaagagagaatcctccctccagaagggtttctaaaaacagccctcagtccttctcatgtctgttccactctggttgcttgagtggcgagggtgggtaagaatcccacaaggtcaccgctggggtctctgcactgggtcacatttccataccatctcctggaaccatcactggg[141 bp omitted]ctgccttccaggttcaagcaattcttctgcctcagcctccctagtagctggcattacaggtgcgcacctgtaatgcccaccaccacgcctggctaatttttgtattttcagtacagacggggtttcaccatgttggtcaggctggtgtcgaactcctgaccttgtgatcctcccacctcggcctcccaaagtgctgagattacaggcctgagccaccgtgcccggccaggaagcactttcttcaggcctgttacacactaagtcctgtcaagtcactactccttgagtccccacactggccaggggagggaggcacaaggagcctcctcttacagttgaggaaaccaaagttcagagagaaaatgcttccacccgtggagagagcaccaagaggaagggccaacaaggggacccagccctgtcactcaagcccaagccctttcactcctcatggtgaccaaagactaaaaaccatggcgtgtgaggagtcagtgaaggaacggggtgctgagtccgcgaatgagattcaagggagacccttgtcttcaaatatttcaaagaatatctttggggaggaggagttttcattccaggagaaccccagtggtaagcgggggactcaggcacgggccacaaacgttcctacctgtaggagccaggcaggaaaccccagtgggtgaagcgcctattaagggaatagtgggaacagggccacatccaggaggggcagccttcactcagcgcacattcagtaacggggcctggagtttcttttttttttccgagatggcatctcgttttgcagcccagactggagtgcagtggtacaatcatagctctctacagccttgacctcctggcatcaagcaatcctcctgcctcaagccccaaagtagctgggactacaggtgtgtgccaccactcccagctaatttttcaatttttttgaagagatgggatctcactatgttgcccaggctggtcttgaactcctgggctcaagcagtcctcctgccttggcctcccaaagtgctgggattataggcatgagccaccacgcctggccagcctggggtttctagaacagtgctgtccacttgaaatctgatgtgacacccaaggggagtttaaaatagtctagtggccacattaagaaaagtaaaacaaggtggatgcggtggctcatgcctataatcccagcactttgagaggctgaggtgggcagatcacttgaggaggccagaagttcaagaccagcctgaccaacatggtgaaaccccgtctctactaaaaatacgaaaattagccgggtatgcctgtaatcccagccacttgggagtcagaggcacgagaatcacttgaaaccaggaagtggaggttgcggtgagccaagattatgccactgcactccagaatgagactctgtctcaaaaaaaaaaaaaaaagtaaaatgaaacaagtgaaattaattttaatattttatttatgtcaatatatccaaaatatcatttcaacatgtaatcaatataaaaattattagtgaggcattttccactctttggtactaagtttttgaaacccatcgtgtatttacaccaatagcacgcctcagtttggactcgccaggtttcaggggcttgacagtcacacataaccactggctaccctaccagacagtgcagctacagaaactctggtttttctacgacagtttggacatccattctgtggcaggttttaaaatgtgaaatcaggccaggtgcggtgactcacacctaaaatcccagcactttgggaggcccaactgggcggatcacgaggtcaggagttcaacaccagcctgaccaacatggtgaaaccccgtctctgctaaaaatacaaaaattaggccgggtgcagtggctcacgccagtaatcccagcactttgggaggccaaggcaggcagatcacttgaggccggcagttcgagaccagcctgaccaacatggagaaaccccatcactactaaaaaatataaaattagctgggcgtggtggcgcatgcctctagtcccagctacttgggaggctgaggcaggagaatcacttgaatctgggaggcggaggttgcggtgagctgagatcgtgccattgcactccagcctgggcaacaagagtgaaactctgtctcagaaaaaaaaaaaaaaaaaacaaaaatacaaagattagccaggtgtggtggcgtgcgcgtgtagtcccagctactcaggaggctgaggcaggagcatcgcttgaacccaggaggtggaggttgcagtgatccgaggtggtgccactgcacttcagcctgggtgacaaagcaagactccatctcaaaaaaaaaaagtgaaatcggtgggtaacaaatacaaaataaacgttgggcagtccaaacgaaacacacctgcctggggccatcgtggcctgcagagcactagttcacaaaccggacgaaaggatatgagatgtggggaatcaaatttgggttccattagtccttttttggaggcttcctgtgtggctggccctgtacctggaggtgtagaaataactatgtggtcctgctgggtatagagagaaaacagcagcagtgcagtgagacaggaagtgttctgacatggaaatgagaggactcagcactagacgtccctctggataagcatgggtgtgtcacttactgtctctgggcccaagttgtattggctataaaactaaataattagacagattttttttttttttaaagacaggatctctgttgcccaggctggagtgcagcagagtcatcatggctcactgcagcctcaacttcctgggctcaagcaatcttcccacctcagcctcctgagtagctgggactataggtaaaggccaccatgtccagttagttttttgttttttatttatttttttttttgagatggagtctcactctgtcacccaggctggagtgcaatggctcggtctcggctcactgcaacctctgcctcccaggttcaagtgattctcctgcctcagcctcctgaatagctgggactacaggcacatgccaccacacccagctaatttttgtattgtatagtagagacggggtttcaccttgttacccaggatggtctcgatctcctgaactcgtgatccgccagcctcggcctcccaaagtgctgcgattacaggcataagccaccgtgcctggcctttttttttttttttaaagagagtgtctcactctgttg[133 bp omitted]attcaaagagatgccggccgggtgcggtggctcacgactataatcccagcactttgggaggccaaggcgggtggaacacctgaagtcaggagttcaagaccagcctggcc[220 bp omitted]gaggcagagaattgcttgagcccaggaggcggaggttgcaatgagctgagattgcgccactgtactccagcctggaccacggagcgagactctgtcaaaaaaaaaaaaaaagagagatgccttggggctgggcacggtggctcacgcctgaaatcccagcactttgcggggctgaggcaggaggatcacttgaagtcaggagtgtttgagaccagcctggccaacatggtgaaatcccatctctaccaaaaaatacaaaaattaggccgggcgcggtggctcacacctgtaatcccagcactttggggggctgaggcaggtggatcacctgaggttgggagttcaagaccagcctggccaacatagtaaaaccccgtctctaaaatacaaaaattagctgggcgtggtggcgggcacctgtagtcccagctacttgggaggctgaggcaggagaattgcttgaacccaggaggcggaggttgcagtgtggtgagattgcaccactgcactccagcctgggcaatagagggagactgtctcaaaaaaaaaaaaaaaattagccaggtgtgatggtacacgcctgtagtcccagctattctgcaggctgaggtaggaaaatcacttgaaccaaggaggcggaagttgcagtgagagaagatcgcgccacagcattccagcctgggagagtgagacctgtctccaaaaaaaaaaaaaaaaaaaaaaagaggtgccttgggctgagcaggcagcaacacaacccccttccccagtcaaccccagcgagcgagcagccccgctcctgtgttttccatatcgggcttccaggcacaaatctaaacagaaggtcccttgacttaagagaaagaaacaaaaaaccggctgaaaaaccacacagcgttggttaaacacacaagctctggcatcacgaagtccaggtgcaaagcccacctttgccactcacccctctgaacctgtttcctcatccacaaagtgccccctctgtagggatgctgtgagggttgcaggagttcatctatgtaacacacagtacctggcacatatcaagtgctcaggaaacgccagctccctgcctcctcaggcttccagagccagcctccagggaagctgcagacagttaggaaggtcttagaggacatctaggaagtttgacctagtcaagggtcaaaaatccaaaagccaacaacagccaggcaggtaacgtaagtgaagaaaataggccaggtgtgaggccaatctggagagagacaaggaaaatatttcactttcctcttaacttcgcaaacaaacaaaaataaccacacggcatcagcccaataataaatgtaacaagcctgcagccaagtcctggggactgtggtgaaaagagctgcgtcccatccattcagatccagccatctgttgccacccagaaatgaggacccagcattgttagactgatggattttttttttcaagagaagccagaaatgtgaaaatctggtttttaaaggctagcgacccattctctttttttaaggaaacagaatgcctcaacaaaaaatgtcaagtgagggtaggacgggggctgcccatgtgtggtccctgacatacatgctctttttttttttttgagatggagtctcactctgttgcccaggttggagtacagtggtgtgatctcggctcactgaaatattcgcctcctgggttcatgcaattttcctgcctca[132 bp omitted]cgcctcagcctcccaaagtgctgggattacaggcatgagccaccatgcccagccaattctcctgaaggtcctctgcaaccctgagggtttggagaaccatcagacaagttctgtgccaaggtaagaagactcttcaagattctctccaaaacctcttcccagcagcacggcgaggaactgcacagctgagagtcttgggagacccagtttctcctcttcctgctcctcctaggcctcgtcgcctacagatagtcaataaggcaaaagcagaagcagaaagaggggcgggggcgggaccccatacacaccagggacagagtggcaaggagcagcaaaagaaaggtttcattttcttctgtttatttcaagagaacaaagattcaaccatcagttctgtacaaaaacatggtgtgagagccatgggatcctcgggccagcccccttcccgcacttgagccccgggcccccctaatttgccaaaaaaccaggagaagaccaaaaaattcaaactctggggaaaaaaattactatgaaaaaaaatcaggggagaccttcctgggcctccctttctccctatccccaatctagaaatttagtgggggtcgcggttcatggccatggcaggaggtggggcagatgggtgtcggcagatttagtgtttggcaaccagtggggctgggggtgggatctgggagggagccgaggggcctggggaagggaaaagatcttggaccctgccccggcccataggacactcaaaaacactttataaaaattggggccacagagtagaagaaaaacgagtcatcagaatcaaaaactaaagagtggaaagatttttttttcttgtctaaaaggcaaaaaactacaaacagcccaagtcctgagctccccaagacctggatcctccactgtccccctgaaacccggcaggaggcgggatggggagcacaagaggtgggttcttaaaaaagtcacccctggatgggaaagctcttcatcttctgccgccttcctctgcctcccgctgctgccgaggagagagatggagaggaccggggctatgccggcaaactcaacttcttcccctttaggactgtgaggagagaaaacagggagggcattaccgctggggcccctgcagggaggggacagcctcccacagccagagcagggcaggcacgctagatgggcagatccacagggagggaggtcccccaggactcacagatacattcctggtttctttccttcctaccctttctcactactggcaattttctttctttctttttttgagacaaggtcccactctgtagcccaggctggagtgcagtggcatagtcacagctccatgcagccttgacctcctcaagcaattctcccacctcagcctcccaaggagctgggaccacaggcgtgcaccaccatgcccagctaatttttttatttttttattttttatagtgacagggtcttgctatgttgctctggaactcctaggcttaagaaatctccctgcctcagtctcccaaagtgctgggattacaggtatgagccaccatgcccaactaattctttctttacttgttcattcaccatctcccccaccagaataaaagggaaatggaggcctttgtctatcttttctcctcctaatgtatccccagagcctagcacctggctggggacatagaaagtactcaatacatttgttgcatgaataaatgaatgaatttcagtgggctgagtccctgccctgcctggcctacgctccaagtgacatgggggctaaggacagaaactccttagcccttagggaggcagaggctaacggtctgaattcctaggaggatggtaggcctgccaccccagaaacccggcgaagaaatgctcccttctttgcataatacaggggtaaggagaccccagtccccagggagggcaggagctgcagaaataggaggttcccttccagccgtcccacattccagctacctttggtgatatagaggtagaagaaatcgcagtagaggactgtctggaccaggcctgccacaatggcgatgaggtcgaagaagccctcgaaatggtagcgccagatccagttgaagagatagagcgtgcggtaaacgcctagcgcaaacaagtagtggctggtgatggtctccgcctcgccggtcttgctcaccatgaacagctgcggcaagatggccactgactccaggtagatggagaaggtccagaggatctgcagagaggccggggacatgatgaggtgggaggggacagggcgggagaaaaggcagaggacaacattgcagttacaggtgccgcgaaggtggagagaaggaaggtgatccaggtgctgccaagtgccagacacagttctgcccgagttactggtacctctgatttaatcatcaccatggcccggcgaggagatcctatgattagcacacttattctacagatgaggaaactgacaccagagaaggtaagatactcgcccaagaccatgtagccagcaagcagcagagcaatgattcgaaccaaggattcgcagtccgttctcatgaacactttgcaattgcgcctctctgaaaggcaggctgggttggaatcttgccttggaaatttcccttcctttttctttttcttttttttttttttgagatggagtatcactctgtcacccaggctggagtgccatggggtgatctcggctcactgcaacctctgcctcttgggttcaagcgtttctcctgcctcagcctcctgagtagctgggattacaggtgcccaccaccacacccggctaatttttgtatttgtagtagagacagggttttgccttgttggccaggctggtctcgaactcctgacctcaggtggtctgcctgccttggcctcccaaagtgctgggattacaggcatgagccaccgtgccgggcccacatgccatttcttgtggcaggctgcatatgctgttcccacagcaggaaaagctcttcccctacactgtcacacatctgcctcctccgtattctcccagcctcagctcattagtcacctcccgagagggaccctccctggccatccttcccccaggactgtcacatcaccccatcttatctccttcctggccactcgcaccagcaattgagctctgtgagggctgggatcctacttcttgttcaccccgtggccctagcacctagcacagttcctgaatgagtgaggaaatgggagttagcatctataaaggggtccccatgtgctcagcacaggccaccatttagggagcactgacaaccatcattcatgagcaggacaggacatcatgggacagggaagaagacatctgccagccccctttcagtccccagctccctgaaagtgccacctggggtgatctgtgatctgcagacacactgaaacctcagagagcaaagccaggtggcaggtgtggctccttggttgtcttggtttgtggaaggaaggtggggggcaccaggacctattcataacaactcatgcttttctagcatttacgacatccaaggcatcgctccttagggtgttaactggcctgagccttaaccccatgaggtaggtactgttgtcattcccattctacagatgaggaaactgaggcccaaaggataagaaacgtgtccagattcccactgaagcacgtagagtccaggacctgctcccagaatcatccagaatcctccagggaggctctcgtgaagccaggttagttgatgctgctgggaaacgaacccattaaattgatgcccattcaactctcacccctggggttgcccttagggaacagagtcaccgtttaaagagagacagaaggtctgttgctttttttttttttttttcctgaggccgagtttcactcttgtcacccaggctggagtgcagtggcgcgatctcggctcactgcaaacctccacctcacgggttcaagtgattctcctgccttaacctcccaagtggctggaattataggcactcaccaccacgccctgctaatttttgtatttttttagtaaagacagggtttcaccatgttggccaggctggtcttgaactcctcacctcaagtgatccacccacctcaccctcccaaagtgctgggatcacaggcgtgagccactgcgcccagtcttgcatttttatctattccatgctgtttgaattttttttttttttttttgagatggcgtcttgctctgtcacccaggctggagtacagtagcacgatctcagctcactgcaacctctgctgcccgggttcaagtgattctcctgcctcagcttcccgagtagctgggattacaggtgcatgccaccatgcccggctaatttttgtatttttaatagacagggggtttcagcatcttggccaggctggtcttgaacccctgacctcgtgatccacgatccacctgtctcagcctcccaaagtgctgggattcaggcgtgagccactgcgcccagcctgatgtctgaatttttaaagaatattttccttaggtcaggcacggcagctcacacctgtaatcccagcactttggaaggctgaggcaggtggatcacttgaggccaggagttcaagatcaccctggtcaacatagcaaaaccctgtctctcctaaaaatacaaaaaaattttacctgggtgtggtggctcatgcctgtaatcccagctactcgggacgctgaggcacgagaattgcttgaacctgggaggcagaggttgcagtgagcagagatcgtgccactgcactccagtctgggtgacacagcaagacttaaaaaaaaaaaaaaaaaaaagacgcctgggttctggtctggcctcctccaccttcagcaagccgcactacctccctcagcctcagtctccccatcttcaaaatgggtctagtaatccctagtcaacagggcagttatgagctaagtcaagggcttggataagtgatccaagcaaggtggtaacaatatgtttgcaaagtccagggcctggagccaagcccaggattcccaccacagcatgatgcagcctccctctgatatctctgacccatgggccaaagtcaccctctgttggatttgtctggcctatacagtgcttttagagatatgttttgaaggccaggcacggtggctcatgcctgtaatcctagcactttgggaagctgagatgggagaattgcttaagaccaggagttcaagaccagcctgtcaacatggtgaaaccccatctctactagaaacacaaaaattagccaggcgtggtggcaagcacctgtaatcccagctactcgggaggctgaggcaggagaaacgcttgacctgggaggcagaggttgcagtgagccaagatcgtgccactgcactccagcctgggcgacagaatgagagtccatctcaaaaaagaaaaaaaaaaaaaaaaaagaaatatagtctgaatctgtggctaaaattttaaaatgagacatcttgcctgaaaactcctgaattatggcttctgttgaaaagatcagcacatctggccacccaggcctatcttcctataaggcaggagtgggcacaggtaagaaaaggttaccctgaatttatgattcctgccaggccccaggaggcaagagatcgcaaacttagcactggctctcgcaaaattcctcccaggagtttgtacaggtcccagcaaaacaccatggaataaaaatcattaacagcgaacatttaaaagtaaaagtatcagagatgggactaaacacttcagtcattgaacattgattgacacagcacttcctacctcatcccagatactgtgctttattaataccaacctctcatttgaaccctatgacataggaactgattatctccattttacagatgaggaaactgaggcacagggtagttatgtgatttgcccagaatcccatagctgctacatggtagaggcagggtccaaatccttacactctgattctagagtctttatgtgttttgacaccaggcagtgctgcaaagtctcagtaaattctcacaatgacctgatcacaactttacaaatgtggaaaccgaggtacagagaggtcaagtcacatgcacgggatcatgctaatagaaactagcagatttggagccgggcgcggtggctcatgcctgtaatcccagcactttgggaggctgaggagagtggatcacctgaggtcaggaattcgagaccagcctggccaatatgttgaaaccctgtctctactaaaaatacaaaaaataacctggcttggtggtgggcatctgcaatctcagctactcgggaggctgaggcaggagaatcgcttgaacctgggaggtggaggttgcagtgagccagaatcatgccactgcctccagtctgggcaaccgagcgagactttgtcgaaagagaaaggaaaaaagaaagaaaggaagaaaaggaagaaaaggaagaaaggaagaaaggaaggaaagaagaaagaaaggaaagaaaggaagaaagaaagaaaggaaagaaagagaaagaaaggaaggaaggaaggaggaaaggaagaaaggaaggaggaaaggaagaaggaaaggaagaaagaaaggaaggaaggaagaaagaaaggaaggaagaaaggaagaaaggaaagaaagaaagaaagaaggaaagaaagaaagaaaa[138 bp omitted]atgtgaaaccctgtctggactaaaaatacaaaaattagcagagcatggtgatgtgcacctgtcttcccaactactcgggaggctgaggtaggataattgcttgaacctgggaggcgggggttgcagtgagccgagatcatgccactgcactccagtctgggcaacagagcgagactttgtctccagaaaaaaaagaatccctaagcctcagtttcctcatctgtaaagtggggctgctgagaaaagtaagtaggtgaaatgcttagggtagtgactgacacatagcgagtcttgctgctgttgtgttaatttcctctgaccccagagcccatgcactgaacttatgcatcctaaaataaggcagtttgggcacaccctgcagaaggaagcctgtgagagggtctcctgtcatagctactctgccacaaccatccccccaaataaggagtcacagcaaggcgcctacctccagaggggtgaagtcatgattgaccaggaacgccagaatggctgtgggaacgaccaggaactccactctgaacgtgtcatggttcccatcgtaagtagctttgaacttgctataaatcaaccagaccgtggtgaaggagcaggctatgtagaccacctgaggagggggatgatgagaaggggcctcaactcacaggcctgtgccccagtaggctcagagcccggagtccaggcccctccctcagacgcaggagtccagacccccaacccctcctccctcagacccaggagtccaagcccccagcccctcctccctcagacccaggagtccaggcccccaacccctcctccctcagatccaggagtccaagcccccagcccctcctccctcagacccaggagtccaggcccccaacccctcctccctcagaccctggagtccaggcccccagcccctcctccctcagacccaggagtccagggccccattccctcctccctcagatccaggagtccaggcccagcccctcctccctcagacccaagagtccaggcccagcccctcctccctcagacccaggagtccaggccccagtcccttcctccctcagacccaaaagtccaggcccccggcccctcctccctcagacccaggagtccagacccccaacccctcctccctcagacccaggagtccaggcctcagtcccttcttccctcagacccaagagtccaggcccccggcccctcctccctcagacccaggagtccaggcccccagcccctcctccctcagacctaggagtctgggacccacacccggctcctctgcctcagtgggggccagagaggtggggtggagcctctaccttcatacacgtgttgtagagtgagatgtagttggtgaagaggtccagatatcgggcagtgaacaccacagcaaacaggacctggctcttccctgaaattcctgtggtccagagacagagaaagagagagagagagagacagagagagagagagagacagacagacagacagacagacagaaggagagaggaagctgggggtgggctgcatgggcaataaactaaggcagggcgcccgggaccagcctggaggcagctctggagtgcagctgtccccggaggcctccccagcccgccccgcctgagcagggccctttcccacggaccacagccagggggcagcccaggcccccgaagctactccagcccgaggctccgtcccagactaggcctcatggctacccctggcccctcagggtcctcccgcagtctggacctgaggtgaggcctagggaggaccttccctgacctcaggccccggatccggtcacctccctcccgttcccttcctggccgccacggtccacgtcaccaactcacagccacctccccgcctgccatggttccctgttcccggtccatgaaccctcgggctgcccagattggggctgggggtggctgaattgggggcctaaagccattcacatgaaactgtatgcacccccgccagtctggggaagggagctgatcccctggagacccagaacctagaagagagatccccagcaagcagtgggggtggaacctgtgcccctagtgcccccaaacccttcctgagtcctgcgacgtcccccaacccccgcccgcaatctctctccttcgccagccctggtgggcctctcaccggcgcacgagcgggacttccagattttgagcagtagcaagatgatggcgaggaggtgggagaggtctcccaggaatcggaagagattcatggctggggaaccctggcagggctgagcgggagggaggcaggctggcgggggggtgccccccgaggctgctggtctgaacgggtagctgggctggggggacggaagagggaccctaggtgcgctccgctccggggaggggactttgggagggggagcaaaggctggagctggcggcggagctggagccgggaagagggaggagagcgagagggggaggagtccgggaggagaggctccgcccccgagggcggggcctggatccccggcgccccctatcgcccacctcctgctttgccgtggcggcgctaaacgcacccccaaagctgccccataggaacttgggagggtcgcagggttcggaaagtgccaaatccagcaccggttcgcccaggcagtctgtgtctctggaagagacgcagtccagtacaccagcctcagcccttgcagggatgtagagactgccctctgagcttgaaaaatcctgcagggacccggaggctcagctgctagcttttgcagctttcaggcactctaactccaatcccccagaagacaagaaagataccccacctacttcctcccctagacccaggactcaaggccccagcccgttcgtcaaacccagaagtctgggtccccagcccctcctccctcagacccaggagtccagacccccagcctctcctccctcagacccagaagtccagacccccagcccctcctccctcagatccaggagtccaggcccagctcctcctcgctcagacccaggagtccaggcccccagcctcctccctcagacccaggagtccaggcccccagcctcctccctcagacccaggactccaggcccccagaccctcctcccccagatccaggagtccaggcccccagcccttcctccctcagacccaggagtccagacccccagcacctcctccctcagacccaggagtccagatccccagcccctcctccctcagacccaggggtccagggccccagcccctcctccctcagacccaggggtccagggccccagcccctcctccctcagacccaggggtccagggccccagcccctcctccctcagacccaggagttcagggccccagcccttttccctcctaggacgctgttccttggaacttagggtcccacccccaccatcttatggatcaaacatcctaaccttaagaatctagatctacagtttctccctttacgacccacagatttaggccctgattctcttctttttcaggaatgtgcacctcaccctgttctcccagaccttgaggatgaaggaaacaggagcctcacccaggaggctcaaggccaaaactctgacccaaactacctcaggagcccctggccctggcttcccccctgctccagagtttctgccctgcccacacacacacaccctcttccaccctcagaggccccggtgtcctgccccacgctctaccccagagccccacgggtggctttataaaagtgccgggcccagccctctagcaggaggggaatgctgggcatctgggtgtgggacccccggggaacagcctgtggtctggactcctgcatctatgaggggacagacgtggcttcccttccggatgatggggtacccacagatgatggaggccagggtccctcaataaaagaaggggtgcaggcgtgttgatttcttcagagggctggaaggacggggtgcccaagggtgacatccacgagtcttgggtccctgagggtggcttgtacgggggagagtcgggatgactgagtccttaaaagagactccgacttggaggcggtccccaaattcctgggtcccagtagagaaggggactcctgggtctgagggaggaggggctggggggtgggactcctgggaccagggtcgagacctggttttcaggcctggccttctggggcaataaaagccacagcttgggtcttagtgtggcgaacactgaagtcagggaaaggcctcctgtttccagagcctcaaggcagggcgggggcagagggcagcaacccccagccctggagtctagctctgaagctggtgtctccataccgggttctgagtccctgcctgcctgtccccagcctgacttcttcctccctttttattttcagcccctcactcccttgtcccaggaggaaggcagaggctggtagctaggggtggggggcggccccctccccaagcctggcaggagaaggggtccccagggaggccaggagggggggctgtgggtctcccggcagtggcagacggggactgaatgttaatcgcatcccgagtgagtgtgtgtgtgcgagaacacagcgagtgtgtgagtccctcccgctccagctcctccaagccgcggccgccgccgccaccctcgcccgcagcctcccgcagcctccctcggccaccggtgcctgctgggggtgttgcctgggtaggtcggcccggcccccaggggtctctcgagcgtctgccatctgcccggtgaggatctgtgtgtccgggtgtctggggctggctggtggagggggggtgtgtctgtaagcgctgcggcggcggagggagggaggggtctgtctgtctgtaccgaccctgagctgcctgcctgggtgtcgtggggctcccgctccttccccccggcccccccaaacccagatggatggtgtgtacctgggttctgtgcctcctgcctgcgtccggccaggcgtctgggcgtccccggctgcctgtgtcctcctgtctgtccaaacagcccctatcagcagtggcagcctggcccccattagaccccccactctgtgtgtgtgtgtctgtgtgtgtgtccctcctcaagctctgggggtgttgagggggaatcccagggaagtgagatcgtgcgtgtgtgcgtgagtgtatgtgtgtttctgcctgtgtttgagagtgggggagtcaagggggggtctagaggtggccaagcgaggaaggggcaagcagttccccaagcaggcaatctcccgctcctcacacgcacacaccagccactagcttcagaggtgacccagacagacagatagacacagacgctggaagggggggtgggggggctgagggcacaaagcgggggtgcgagtgagccagggagaggcgggactggacacatggaaaggggggaggagccggggctgaagcggcagaggggggcaccccgggtgggcggaggggggatccccacggggtcggggcggcaagaggacaccccgacagcctctgcaatgtccggggcccaacttccagagcaacatgtgtagccacgtcctcgcctagtccaggtggccgcaaccttgggggagagacagggcaggacaggaccaaggaagaggaaggagagacggagccagggacagacaggaggtccgggctgccgctgctgccgccaccaccactgccgccgccccggggcctgccccccgacatcggctctctgagccctcctcggaatcttggggtcgctggacgccgggttccggtcctggcccccccgccatccccccaacagaacagggtcatgaaaaggtaaggcggggacaggggatgcagggatggtggtgggaatgtggacccccaaatctaggacagaggaagttggcaagaagcctcgtggagggagggggtttgaacggtgggcaggggtcttgacccccacctagctcccctgtccctcagggactctcctccaccctctctctctccctctctgagcccctttttcctgagtccctacacctcagacctttcacgcccccatttctctgacacttggctccctctccccatccccacatacctgatgccccatatccctgtgcctccatctctctatctcaccttctccctgtacccccctccctgcatcagtccccccatcgcgagccggtcctctccctctctcctctcgctctcccctcccatgtcagagctatgagtctgctattaatacccccgccaaggaccttgagggcatccaggcccccagcacccctcgccccaagctcccaccccttcctcaaggttctggaacacccttccagcctcttccaagcatcaggattcgggtggggagagaccgatgttgtgtgtgtgtgttgggaggtgaggggggaggaaacgggatgccgtctgcagcacaactcgaggttgtggggggagctgttgatcgaagtggccgctcctctcttctctgttggatgctgtggggggcaatgaagacagggacaccctaggaatttctggcaccctcctcctcctccccgcttggggacaggctgtgctatgtacaggatctaagtggggtgactagggaggccagagctcggtgggggggcacccaggatgttgggaaggatagggtttgaaaccaaaaggggatccttaagggaggacaggagccggaacccggactcctgggtccttgggggaagaggggagctggggacctggactcttggttcctgcagggagaggaggctgggcactggagttccagagtcttggggcaggaggggcctggcctcctgggtcctgggaaagaacaggaccgaatgcccagactcccaaggcctgggggaggaaggggctgccagaaggactcctgggtctttacgggaggaggtaggggatagcgcttccgtctgaggaaggcaggctgggagctcagtctcctgagtccctgacagggcaggagatgagtgttggggactttagccctatgcagatggaagtggaaacggaggctcatgaggaggtagagatggaggcggggggagcggggggttgtccagaggctggactctgtgatccctgagggcgtgggttctgggggttgggccttcagagtcctggaggactggggatgcccctcctcaggccctggagtgggggaggctgctctccctaatccctgtggttaggaactgagcatgcagcccccgtgagaagggtggggccgggggctgccctcctgggcctcagtagggagtgggacgcggggtccctaagagcagaagccaggtaggggtgggtctgggagaggcagaggaggggctggagggtgagcagccactgggaatggaggggagcgtgagtgttaaccccgcgggggccaggccacagctgtgggttattttggggcggagtgggggggttattctgagcgctgattgagccagctgcttggggaagggcaatggaaaggaggagcgaagagaagccaggatcggggagggatgggcatactaggagcccccaaccccttccctggggagacaggggcccgagatctctgggaaggtgaggtggtgggcagaggggacgggctgtggcctcgaggcaggggaggggtggtggacctttcccccgccctggctgtctgtggggtggacgaggcctgcgctaccatggcaaccagacaggagcatgacagccaggagagaacccttccttgtctggaccctcaccccttctggaagcccctagtgcggactccagtccttctctgggaaccaggagtccagactcccagtgccctcctccctcagtcccaggcaggacccaggagcctggctcccagcccaaccaccccaggcggctagtattcaacagggggcacaggaagagaggctgtatttcctctaatttaccaaattgctctgggctgggtgccagggacccccacacccaccccacccagctctccacagctgtgccccccaaccccacatcccagatggggccatgactcccttgctttgagaatgaggggatggggacaggactaaggggacaaaatgggttaggggttgtggtcagggtgaggagtaaggtcatgtggggattttctctccttggggtgccccactaatttctctctttctctccccacacacctgaccccttttccctctcattttttctctcccttttcctcccttttatttctgctccctcctgccactcgccttccccgccttactttcatgtctgtactgggcacctccctggtgggggtcccgatcttggccttgcttcgctatttctgtcctcctgttttcgctccgctctgcctgcctccctcaatctcaattgtttccccatcctttatgtgcgcgtgtctcttggtggccttggggtctctgtctccctcttcctgccttgctgtcttcttctctgtccaactttcttgcctcgcttatctctcccgccttcctgcatctcttcccgcctctatcatcctctccctgggcctccctcattcctgtttctgtcactccgtcctctctctctccgtcttctccccgtctctgctgcttccgtctctctccttcttcctgccgctctttccctccccgtctccctgggcctctctctgctcctatcttgatcccatctctgtgggtgtccccatccccaccttgtctatcttcctctctctcccctcttacctctgtatcttcccctgaccccattatccaccctcgtctttgcgtctcccccaatcccatactccacttcttcctatctctgtctcgccctatctctgcgtctctccctgtttcacctcttcctctggtgtttcttccccacctctcccttccacctccctctgctgtgtctgtctctccctctgtctctgcctgtctctcctccatctctctctctccgtctccccctctctctcccctccatctctctctacctctgcccgtctctccctctgtctctcctccatttctctctccctctgtctctctcccttccatctctctcgtcctccgttcctgtctctccctctgttccatcaccccgaccgctccctgtcctccccatctcggcgcctgtccctcgctgcatctcctcctctgtgcgtctctttatctcgtctccctgtccctgcgtctcccgtctgtgcctccctctcctccccgtctctcccggcccgggcgctcagaggccgcccggcggggcccgcaggcgatgcgcggcgccggtggcccccgcggccctcggggccccgctaagatgctgctgctgctggcgctggcctgcgccagcccgttcccggaggaggcgccggggccgggcggggccggtgggcccggcggcggcctcggcggggcgcggccgctcaacgtggcgctcgtgttctcggggcccgcgtacgcggccgaggcggcacgcctgggcccggccgtggcggcggcggtgcgcagcccgggcctagacgtgcggcccgtggcgctggtgctcaacggctcggacccgcgcagcctcgtgctgcagctctgcgacctgctgtcggggttgcgcgtgcacggcgtggtcttcgaagacgactcgcgcgcgcccgccgtcgcgcccatcctcgacttcctgtcggcgcagacctcgctgcccatcgtggccgtgcacggcggcgccgcgctcgtgctcacgcccaaggtgcgcgcgaccggggcggggcggggccacaggaggggcggggacagccgctgaggggcgggactgggacagccagcgggggcggggcctagagggggcggggactgtcctgtgggtccgagtctgggacaaggtgggcccagatggtaggcagggcttagggctagattagaggcggggctgacttggagggggctggtctatagggtaagctgggcctttagggtcagaaagaggccagtcctcgatgatcagagtatagggaggacgtgggcccattcattgcaggtaagggtctgtagtaaaggcgagtcgagggaagggttaggggctgggaacgaaaagggactagccccaaatggcaaaatctgagggaggggtgggacctaggatcagcacaggaagaagtcagttgaaaaggaatgggcctgggcgcggtggctcacgcctgtaatcccagcgctttggaaagccgaggccggcggatcacttgaggtcacaggagtttgagaccagcctggccaacatggtgaaaccccgtctctactaaatatacaaaaattagccgggcgttgtggcgggcgcctgtaatcccaactactcgggagggtgaggcaagagaattgcttgaatccgggaggcggaggctgcggtgagccgagatcgtgccactgcactccagcctgggcgacacagtgagactctgtccaaaagaaaaagaaaaggaatggagttcagaaagaaaggggcgaagtctagtggagaggtggcagctaggaagtatcagaggtatcaggtaccaaggacagagtttggggaggcgttcggccggtagagcatagggtctagaagtcagccagggatggaggagccatcttctaagtggaagtcggaaaagaggaagagtcattagagagaggaggacgggcaaggggtagaaccaggaagcaaggaattgagatttggtgcgaggccagtcagggaaggagtgagtcagaaaagggggcggggctagccagttgggggcggggccagcgaggggcggggcctaagcactctaataaaggggtgggtctagggaggaagccggtcctgagagtagggtttgagaaggggcataccccgctgtgaggtgtggaaagcgagagtccagaggatgggcaggaggatgaaggcttatggtggaggccgacccagccaatgacagatcaaagccaggagcctgctgggaagggatggtagaggctggagctggccagagcctggagaaaggcctgactcccaagggcacagaaggggccagttgtagcggacctctggtagagaaggagagaattggaccaagcctgctctgtggattgagaatgggtcagctaggaggtggggcctgagaaggggcggggcctctccagaggtggggccagcgcaacccagaggtggagcttcattcaatctgcccattccctgctgtgcgggcctgtggctgtgtgactgcatcactgttgtatgcagaggctcgtagtcctctcctgtccagagcattctgggaaggacctctgtccaactttcttgttctccttggcatggtacttttcagagatttgtaggtagatgccctgggaggcgaacttatttcttaactgccacttccaaggcatactcaaaagacgtgatccctcgtgccttcattgctgctgagaagtgtggtcctctctgtttcattgtccgctgggcactgcggtcggctcagtgtacgcccatagcattctgggaaatgtagtccccgtgctgcccctggatggaagaaagaatgatcttcacagctccatctgtgccccactgaatgctgggaatgtggtcccctcagcacacctccacctgctgaaggaagaggttc[135 bp omitted]accccatctctgctgaaaatatgaaaattagccgggcatggtggcgcatgcctgtaatcccagctactcaggaggctgaggcaggagtaatcgcttgaacctgggaggcggaggttgcagtgagccgagattgcagtgagccgagatcttgccactgcactccagcctgggggacagagtgagactgttctcaaaaaaaaaaaaaaaacaataaacaaaaagaactcattccctcaggacaactgcagtatcccctgtgcgcctagggagaaagcccacttgctgttctcattgcattacaggaagatttattgagagctgattctgtgccagggctgttttaattcctagggaatacagttctagagggggggggaaaaaaagagagggagacaaggtccctgccttatagagcttgcattttaatggtgagacagacaaaaccagtaacagtaaaatccggctgtcctggaggaaatcaacacaggatgttgtaatgactgaggatggagtttcaatagatggcagtcaggggaggcctccctgaggcggtgacacctgagctggaggtgtcaggtggaggtctggcatggaggaggtagggaaaagtgtccccaggagaggcaacaacaaaggacaaagcccttgaagcaggaaggagcttgatgtatttgaggaagagcaagaagggagtgtggctggagcccactgggggattggggtggcaggagatgaggtcagagaagcaacgggggccagttcacgcagggccttggggccacggtgaggactttggctttgattctgaggtagaatcactggaaggttttcaattgagaagggatgtgatccaattaatattttgaaacaatcactctggctgctgtttggagaatagactggaagatgcaagattgaaaacaaagataggctgggcgcagtggctcatgcctggaatcccaccactttgggaggccaaggcgggtggatcacttgaggtgaggagtttgataccagcctggccaacatggtgaaacctccctctactaaaaatacaaaaatgagcttggcatggtggtgcatgcatgtaatcccagctacttgggaggctgaggcaggagaattgcttgaactcaggaggtggaggttgcagtgaggcgagatctcgccactgcattccagcctggacaacagagcgaaacttgaaagaaagagagaaagagaaggaaagaaagaaagaaagaaagaaagaaagaaagaaagaaagaaagaaagaaagagagaaaagaaaacagagatgggtgggaaagttgtagatagctgggcaagaaagggtgacaatgagagttgtgacagtgatggcagtgaggagtggacaactggagctatctttgaacgtagagctaagaagacttggagatggctgaatgtgtgagggaaagaaagggaaaggatgatttaggtttggggcctgagcatcagggtgaatgagagagagaggaaaaaaaaggcagct[212 bp omitted]gaggcaggagaatggcgtgaacccgggaagcggagctttcagtgagccgagattgcgccactgcggtccgcagtccggcctgggcgacagagcaagactccgtctcaaaaaaaaaaaaaaaaaaaaaaaagattctttactcctttacgagagagagagagagagagagagagagagagagagagagaatagggaacagtcttgagataggggaaagatcgagcaatctgtttttgacatgctaattttgagacaccttggaaatccaagaggagatattgaataaaaaggaggataggggccaggcatggtggctcacacctgtaatcccagcactttgggaagccgaggcaggcagatcacttgagttcagaagttcgagaccagcttggccaacatggtgaaaccctgtctctactaaaaatacaaaaattagctgggtgtggtggcatgtgcctgtaatcccagctactcagaaggctgaggcaggagaattgcttgaacccaggaggcagaggt[137 bp omitted]acaggagccattaacatatccagcactgttcaataaaactttcagcaaagatgaagctgttctatagctgctctgtccgatttgaaagccacaagccacatgtggctgttgagtacttgacaagtggttagtgcacccagaaaactaagttttaaattctatttaacatttttttcctctggtccttgattcaggataaattttatttaattttaatttgaatagttatgagtggctaacagccaccctattggatagcatgggagacagtatttaaactcatgggcctggttgagatcaccagggagagaggaatagagaagagaacagtaaggcactcctagtgtttagaatttagaattctggctgaggaagaagggccagcaaaggaggcagaggaagaggtgacagagaggtaggaggaaaaccaaagaagggaaaggacactctgcaaagcttcttccagtagggaaataccatcagcaccctcattgcatgctgggagatgtagtctcctcactgccttcagggaaccagtccctctcagtggctgctgggggctgtagttcccttaccggatgctggttgtattaatgacagtgatgttagctgctggaacggatgaacccccaaatctcagtggatcacccaacaggaggttgtttctcattcatataaaatccaggccaggcacagtggctcacgcctgtaattccagcactttgggaggccaaagcgggtggatcatctgaggtcaggagttcaagaccagcctggccaacatggagaaaacccgtctctaccagaaatacaaaaattagttgggcgtggtggcgcacgcctatagtcccagctactcgggaggctgaggcaggagaactgcttgaacccgggaggcggatgttgcagtgagccgagattgtgccattgcactccagtctgggcaacaagagtgaaattccatctcaaaaaaaaaaaaaaaaaatccaaacaggtgttcctgattggaggtggctttcctccgtatggtgactcggggtttcaggctctcaccctcttgtagctctgtaatccccttcagaggactaagcttcaagagtaaggttttattaggctgggcacggcaggagaatcacttgaacccaggaggcggaggttgcagtgagccaagatcatgccgctgctcaccggcctgggcgacagagcaagattctgtctcaaaaaaacaaaaaacaaaaaaacaaaacaaaaaactaaggttttatggatgagtctagaataactcatcacgtggctaaacctaatccagatctagccctgtgccccaggaggaaaaggagatgggtttagtgaacctgtcgagtcagtctgccatattgggagctgtggtccccttattcattgctgagaaataaggtccccacatcggcaggcctgacatcctcctccctccctggcaggagaagggctccaccttcctgcagctgggctcttccaccgagcaacagcttcaggtcatctttgaggtgctggaggagtatgactggacgtcctttgtagccgtgaccactcgtgcccctggccaccgggccttcctgtcctacattgaggtgctgactgacggtagtctggtgggctgggagcaccgcggagcgctgacgctggaccctggggcgggcgaggccgtgctcagtgcccagctccgcagtgtcagcgcgcagatccgcctgctcttctgcgcccgagaggaggccgagcccgtgttccgcgcagctgaggaggctggcctcactggatctggctacgtctggttcatggtggggccccagctggctggaggcgggggctctggggcccctggtgagccccctcttctgccaggaggcgcccccctgcctgccgggctgtttgcagtgcgctcggctggctggcgggatgacctggctcggcgagtggcagctggcgtggccgtagtggccagaggtgcccaggccctgctgcgtgattatggtttccttcctgagctcggccacgactgtcgcgcccagaaccgcacccaccgcggcgagagtctgcataggtgagtggggctggaatgggaggggtgtgggagggctcccagagcctaactacctcagtattcactgaatgagtggctcaaatgggccacatctgctctttgagcctcagttttcttttctgtaaagtgggtgcaattgggtctcttttctgaggttaaatcaagtaatttggaaaaagcacctgagataaagtgagtgtattactatatttcatgactctaagatgcataatgtttcacattttaatgtctttgaaaacgagatgtgtcttataattgatgacttatcatggcttaattggcagcacttttgtctttctttgtggtacatcttataattgagagcattttagatttagtctaaatacctagactataaactgagcttcagtagcaaaaaagacccaacaatccagtggcccagatgaggtcgaagtttgttcctctctcacgtaacaaccctgataaggagactgctgttccatgtgatcattcagggacccaggattctcccacactgttactctggcatctctgcatggtcgaagtgggtcgtggggatgtctgaattgtagctcatgagaaggggaaaagagaggaagtggacagcaagcactttccttttgagtaagtgaggcagaaaggacacgcctcataccttactgttgagaacgtagtcatatggtcagggctggcttactggttgttgacagtggtgtccattctgattggttggacgtctattggaattagctagacgtctattctgattagctagacgcctattctgattgactagacgtccattccgataggctagacgtccattcctggctagacgtccattctgattggctagtgcctgtgcagcgccgattgctacatattttgaatattactcctgcacatggcctggccaactgcaaggaagagtgggaaatgtcagtcctagctggacaggtgtgtgcccaacttacgcactattattttagaagaggcgaacagagtttgttggaaaatagcatctccacggtaggaagctctgggagtggaaaaattggtaagtttggtgacagaacagtgaaaagagagacctttaatcctgaacgaggatggggtgaatttgggaagagatgatggttggggaagaagacctaagagagggtaattgagaactggtgacttgggaatcaggatccccgaaaaagaggatgagaaaagcatcccttcttcataaatacttactgagcacccgctaggaactagggctcatgctgggcgctgggaacatagatgaataagaccatgaacttattcttcaaagaacgcagggtcctgtaagagtggcagacagggacagggataatggcaacgcagcatgatgcttgcagtaatggaggtcatgcgggcatggcgggggcacggggaggagcactggctaagccaggagattttcggatgcatgaagcagagtctcactggagtttccttagggaaaagggggtttattggaaaaataaacacacagaggaattaaagccaggaattgaggctaagcctggggccagctactctttcagctctttctggttctttctttttttctttttctttctttctttttcctttttctttttttttttgagacggagtctcactctgtcgcccagctggagtgcgatggcgtgatctgggctcactgcaacctccacctcctgagttcaagcgattctcctgcctcagcctcctgagtagctggggttacaggcacgtgccaccatgcccggctaattttttttgtatttttagtagagatgccatgttggtcaggccagtctcgaactcctaacctcaaatgaactgcccacctcggcctcccaaagtgctgggattccagccgtgagccaccgagcccagctggttctgtctttcttattctatgctttctccctccctccctctgtccatctccttcctctctctctctctttctctttgtttctcaggcttgcctctcccagacgctgttcagttctttacccagaatttcttctccctcataacttcagctcttgctggtcacaactcatccctccagatctcatagcaaaatgtcatcccaagagaggaaatgtattagcctcagtctgccttccaaaccaggttgcacaagtcacaagtcagcctgtggagtcaggaaggtttctaggagaaggtatctgagctgtgacctgagggatgaattgctcattgattcatttattgattgaaacgccctttattgaaagtctgctatgtgccaagcattgctttaggcacagggtgtatatagtgttaaataaggtccctgctctctcagagcttacaatctgataaaagagaaatgcaatgagcaaataagtaaagaaaaggaaatatcaagcaggcaataacttctgctatgaaaatcaaactggggaatgtgataagaaatgcatagggggctatgctaggtggggtggtcaggaaaggcctttctgaataggtgaaatttggaggttaaaaaacatggataggccgggctgtggctcatgcctgtaatctcagcatttcgggaggctgaggcaggaggatcgctagaggccaggagttccaggccagcctgggtaacatagtgagaactccatctct[135 bp omitted]cctgtctctactaaaaatacaaaaaattagccaggcgtggtggcgggcgcctgtagtcccagctactcgggaggctgaggcaggagaatggcatgaacccgggaggcggagcttgcagtgagccgagatcgagccactgcactccagcctgggtgacagagtgagactccatctcaaaaaaaaaaaaaaaaaaatctgggcgtggtagtgtgtgcctgtagtcctagctacttgggaggctgacatgggaggatcacttgagccttggagatcgaggctgtaatgaactgtgatctcttcactgcagtccagcctgtgcaacaaagtgagaccctgtctctaaaataatttaaaaaattaaaatttaagaaataggtaggcaaggtgtggtggctcacacctgtaatctcagggctttgggaggctgaggtgggcggatcacttgaggtcaggagttcaagaccagcctggccaacacagggaaacaccatctctactaaaaactacaaaacttagccgggcgtggtgacaggcacctgtaatcctagctgcttgggaggctgaggcaggagaatcacttgaacctgggaggtgaaggttgcagtgagccgagaccataccactgcactccagcctcagtgacagagcaagactctgtcttaaaaaaaaaaaaaaagagagaaagaaagaaatggataaagcgaaggagccaagtattggaagatctcagtgaagggagagggaacagcaggtgcaaaggctctggggctggaactgccttgtcttagtctgttttgtgttgctatgacagaatatcataggctgggtaattataatgaatggaaatttgttggctcttggttctggaggctgggaagtccaacatcaagatgtcaccgtctgatgagggtcttctttcagcatcattacatgagggaaggcatcacatggtagaagggcaaagagaggagtgagggaagatcaagcaaacccactcctgcaaccacagcattagtccatttgtgagggtactggagccccatgacctaaatgcttcttaaagtttccacctcctaattcccaataccatcacaatggcaatggcaattaaatttcttttttttttttttttttttttgagatgaagtctcactctgttgcccaggcgggagtgcagtgatgtgatcttggctcattgcaacctccacctcctggattcaagcgattctcctgcctcagcctccgagtagctgggaccacaggtgcctgccaccacacctggctaatttttgtatttttgtagagatggggtttcactatgttggccaggctgctctcaaactcctgacctcaggtgatccacccacctcagcctcccaaagtgttgggattacgggcgtgagccactgcacctggccgtaaatttcaatatgagttttggagcggacagacatccaaatcatagcttgcctgttcggaagcctgtttgggagcctgcactgctggtgtggctagaacatagtgggcaaggggaaggaaggtatgagtagcggatggagagggttgcagggcccagcttgtgaagggcctttaggccagggggcaggggtttggacatgattcttttttttcttttttttgagatacagtctcgctctgttgccctggctggagtgcagtggcacaatcttggttcagtgcaacctcaacctccctcccgggtttaagtgattgtcctgcctcagc[214 bp omitted]ggaaatagtattccagtcaggggaaacgagcatatgcaaaaacccagaggggagagaaacttgggcagatggtgggaccacaatagttc[146 bp omitted]cccgtctctactaaaaatacacaaattagctggacatggtggtgcacgcctgtaatcccagctactcgggaggctgaggcaggagaaccgcttgaacccaggagacggaggttgcagtgagctgagatcgtgccactgcactccagcctgggcaacagagtgagactctgactcaaaaaaaaaaaaaaaaaaaaaaaagcagtcggagtgtgggtggcaccaggcctttgccttcaatgcaggttgagaggcctggatctgttccacagcactggtgagccaggggtgggttatgagcaggagacgggtggcgtgagttttgggtatagaaagacgcctctgggacctggtggggaacagactggagtagagagattggaggctggaggccaggcaggaggctgggatgagggcctaggagggctgtggggaggcacagaagaagacagggcagagagagccccaggccaggaagaaggagacttggggaccgataggctgggtagcgggagggaggaaggcggctaagagtctagtccagtgactgggtggatgacatgagagacagtcagagtacccagggtgatgttgcatagtgaagatattgaggagtccagggacacccccggccatccccagccctgggcacttctaaccagaggaagagacatttgagctcagtctttaagacacatggagttggtcaaggctgggtacagcggctcgtgccagtaatcccagcactttgggaggtcaaagcaagtagatcatctgagcttgggacatggcgaaacctcgtctccaccaaaaatacaaaaattagttgggcatggcggtgcacatttaaagtcccagcagcttcacaggaggctgaggtggaaggatcacttgagcctgtgaggcagaggttgcagtgagccaagatcacgccattgcactgcaatctgggtgacagagtgagaccccgtctcaaaataataataataataataataataataataataataataataggccggcagtggtggctcacgcctgtaatcccagaactttgggaggccgaggtgggcagatcacaaggtgaggagttcaagaccagcctgaccaacatggtgaaaccctgtctctactaaaaatacaaaattaggcaggcgcggtggtgcttgcctgtaatcccagctactcaggaggctgaggcaggagaatcgcttggacctgggaggcggaggttccagcgagctgagattgcaccattgcactccagcctaggtgacagagcaagactccatctcaataataaataaataaataaataagaagaatagttggtcaggataaggggtggtataaggtttttcaggcagagagaacagcatctgcaaagtcctagagataagaaatcacttgacatgtttgggagacaccttgaagccagtgttgatagagaaaaaaaaaaagaattttggggtgaaaagagtttgaagtttgagggtgggaactctcagagatgcggcttcagaggaaggcaaagccagaacaaaaacagactctaggggcctggcacagtgattcacacctgtaatcccactatgttgggaggttgaggtgggaggatcacttgaactcaggagttcaagaccagcctgggaaaagtagtgagaccctatctctacttaaaaaaaaaaagaggctgggcgtggtggctcatgcctgtaatcccagcactttggaaggccgaggcaggcggatcacaaggtcaggagatcaagaccatcctggctaacacggtgaaaccccgtctctactaaaaaaaatacaaaaaattagctgggtgtggtggcaggtgcctgtagtcccagttacttgtgaggctgaggcaggagaat[141 bp omitted]gaagaaagagaaagaaaagaaagaaagaaagagaaagaaaagaaagaaagaaagaaagaaagaaagaaagaaagaaagaaagaaagaaagaaagaaagagagagaaagaaagaggcgggccaggccaggcgcggtggctcacgcttgtaatcccagccctttgggaggctgaggcgggcggatcacctgaggtcatgagttcgagaccaccctggtcaacatggtgaaaccctgtctctactaaaaatacaaaaaattagccgggcatggtcgtgggcgcctgtaatcccagctactcgggaggctgaggcaggagaattgcttgaacccgggaggcggaggttgcagtgagctgagaccacaccattgcactccagcctgggcaacaagagcaaaactctgtctcaagaaacaaaaacaaaaacaaacaaaaaaccacacattaaaaaaaaaaaaaaaagaaagaggagggcatggtggctcatgcctgtaatcccaacactttgggaggctgaggcaggtggatcactgaggctgaggtcaggagttctagaccagtctggccaacatggtgaaaccccatctctactaaaaatacaaaaattagctggacatggtggtgaacacctgcaatcccagctactcaggaggctgaggcaggagaattgcttgaacccgggaggcggaggttgcagtgagccgagaccataccattgcactccagcctgggcaacaagagcaagactctgtctcaaaaaacaaaaacaaaaacaaacaaaaaaaccacacattaaaaaaaaaaaaaaagaaagagggcatggtggctcatgcctgtaatcccaacactttgggaggctgaggcaggtggatcactgaggctgaggtcaggagttctagaccagtctggccaacatggtgaaaccccatctctactaaaaatacaaaaattagctggacatggtggtgaacacctgcaatcccagctactcaggaggctgaggcaggaggattgcttgaaccaggaggcggaggttgcagtgagcgaagatcatgccactgcactccagcctgggtgacagagcaagactctgtctcaaaaaacaaaacaaaaacaaaaacaaacaaaatattagccaagcatggtggtgcatgtctataatcccagctacttgggaggctgaggcaggagaatcacttgaacccaggaagtggaggt[133 bp omitted]gaaagaaaaggggactctagggcctcaacaccaagctgaaagagagtctggaaccttatcctggggggcactgggcagccaaggggagggtgctgagcagggaaggggtatattcgtgtttttgagaccttggaggtaaaagaagagagattccagctgggggctggggctggtctgcagaaaggggactttctctgccttccgctgccaaggtccagcccaggccccagcatgtcccctttccctcctcctgggcaggtacttcatgaacatcacgtgggataaccgggattactccttcaatgaggacggcttcctagtgaacccctccctggtggtcatctccctcaccagagacaggacgtgggaggtggtgagtcgtagccccagacctcaggcatggcagagggtgtggactcctgcatcctggcagagggggggcttgaggtcgtggactaagagggaggaggggacaaggagcctggactcctgggtcctgggatctgaaggtgggaggggctcctgggtcttggaagaagctgctgcccacacacctaggtctgagggaagaggatcatggaggccaggatacaccgggaagtcttcccaggaagcctgactctctttccctttggccaaggtgggcagctgggagcagcagacgctccgcctcaagtacccgctgtggtcccgctatggtcgcttcctgcagccagtggacgacacgcagcacctcacggtggccacgctggaggaaaggccgtttgtcatcgtggagcctgcagaccctatcagcggcacctgcatccgagactccgtcccctgccggagccagctcaaccgaacccacaggtgacagctcgggatccaggagttccggctccaaaacccgcctcccgtgaagcccagtagtctgggcccccagccccctcctcccttgggacccaggacccacaaagccctccagcttggtgaccttaggcaaacctcagaattctttgagcctgagtttcccctgaaagcgctaaccatagttttagctgccgcctatcccttcctccatatcctctcttcatgagagagtctaaggagggggtccccaaactccccaagcctggtcactgcccgcagccctccaccggatgccccccgcccggaaaagcgctgctgcaagggtttctgcatcgacattctgaagcggctggcgcataccatcggcttcagctacgacctctacctggtcaccaatggcaagcacggaaagaagatcgatggcgtctggaacggcatgatcggggaggtgagggggcggacgg[134 bp omitted]caaaacggtgaaaccccgtctctactaaaatgcaaaaaattagccgtgcgtggtggcgggcgcctgtaatcccagctactcgggaggctgaggcaggagaattgcttgaacccgggaggcggaggttgcagtaagcggagatcgcgccactgcactccagcctgggcacagagtgagactcagtctcaaaaaataataataaaaaaaaagaggtcggcaccctggggcaggggcgcggccaaattgaggaaacacctgattggggcctggggcggggtcgcgggagggacatgccttggaacagggggcggggtcaggaggtgtcaggggcggggtttggaggagggactttggagcagaggaggcggggctaggagggtgggactcctaggggaagggggcagggctgggaggagggactttggggcagtggaggcggggctaggagggtgggactcctaggggaagggggcggggctgggaggagggactttggtacagaggaggaggggccaggagggtgagaatctaggggaagagggtggggctgggaagatctggaccaaggccttgaggtcttgctgggagcagccgggtaggacgcgggctaccaattcccaatcttgttccccatttctcacctccgcccttccctgccccactcttcgtccccctcctcacccacctcgcaatccctcttggccccttccctcaccctgtcactggtctgctcccggggcccgtctctgctcgccgtccgtgtcagtctgtccgcttgagccgggttcccccgcccactcctcatcgcccccaccccaggtgttctaccagcgcgcagacatggccatcggctccctcaccatcaacgaggagcgctccgagatcgtggacttctccgtccccttcgtggagaccggcatcagcgtcatggtggcgcgcagcaatggcacggtgtccccctcggccttcctcggtaatctggggccctgggacagggagctagccctaggcaaagtagccgtccccaaccgtgtgggccctgggatcagaaaacctgggttcccggtatcatcggtacttgaacccgctgtgcaacttcggtgaagtgacatcatttctgaacctcagtttcctaatctacaagatggaagaaataatttccctacccagaagacatttcatcaagaggctaaagaagcttgagctcaggagccttctcttgcactgcagcttccaagccctgcacctggttttgtattcataaggttgaattattttttctcaaagagagccctccaaattgtgcaagcttcaggccccacaaaacccaagtgttttcctgtactaggtatgagatgaagagaacaaattagcatggtaccaataccttgtaagcacttaagtcaccatcagtgtttactgagcatctactatgtgccaggtggtgggctccacactgggaacacagtggcaaatgaggaagacacaaatccctgtccagtaggatctctcagccttgtgaaggaggcagaagataagcttctacttctctctctctctctctttttttttttttcagacagagtctcactctgtcgcccaggctggaatgcagtggcaccatctcggctcactgcaacctcaacctgcctctcaggtttaagcgattctcctgcctc[134 bp omitted]cagcctcccaaaatgctggaattacaggcgtgagccactgcacccggacaagggttttaactacagaagatggtgtggggatatataatcagatttaagtttttaaaatatccagctctgtgtaatcccagctactccggaggctgaggtgtaaggatggcttgaacccaggaggcagaggttgcagtgagccaagatggcaccaccgcactccagcctggatgacagagccagaccctatctctaaaaaagaacaaagaaaaaaatcccactctgtggaagcaagtggctggtggggatgctactgcaaggtttatgccagagacagagtgggggtgtgcaataggaaggtgacagcagacagatgcagggtgtggttagagagctgcccaccagatgggctggtggctttgagatggattgggtagagggaccattgctgagctggagaagcgtacatcggccaagggcaacagtgcttgtcagttcccacttgctctctgaagtgtgagcaaagctcctgggagaggggaggggctggaagaagagccatcccttcctttgtgttttgttttctgtttatttcgcccagtggtgtctcctgtggcctcccctttgcaccaaggtctctgcagggcacactgagaagcaccacgtggggcccctgcttgcaggcagcacactgcagaggagtgacaaggtcctatttatgccccaccaagttgcccagcagaggtgacaggcgtgtccccagctgccgcagtgacagtccagggtgctgaccttgctgtgacgggggcagtcctgacagctcacacttggccctggaaagttgaatcacctggtcctaatctcaatgaaatggtgatttgggtttattgttggtgagctcccaggggctaaacacagttatcgaatgtgaggaggggacacatgaatgggaggttgtctaatggacagggcagggtgttaactctagcagggacacctaggagacaaggaagagagggtgtcgctgattcaggcacctgcgagttcttttttttttttttttttgagacagagtcttgctctgtcacccaggctggagtgcagtggcacgatctcagctcactgcaacctccacctcctgggttcaagcaattctcctgcctcagcctactgagtagttgggactacaggcgcccaccacgacacccagctaattttgtatttttagtagagatggggtttcaccatgttggccaggctggtcttgaactcctgaccttaggtgatcctcccacctcggcctcccaaagtactgggattacaggcgtgaaccaccacacccagccacctgtgagttttgagtaaagcatgggtgcttgagagagtgatcaggacagaaaggagagtgtgacaaggctgagtggcagggactttgtcctgggggtgctagggagcctggggagggctgtaagcaggggaggggccaggtcctctctgtgctgtgtgggggataggctgtaggggacagacaggagctcaggaggctggggaaatggttggtgggaggagatgaggcctgagccctgttggccatgagaatggagaggagaggcccaagtagcatcaggggcaggagcgtggggctggatactgacaggctgtggccagcgagggagaaggagggaggaagggaggacggcaaatgaggtttgggcctgtgactgggtggatggtggggctcccatcatgaggagcgtgggagctggtctgggctcagcatgggacatgatgaatggcctgaggagatggctggggtaggtggaggcttgggcctgtgactcaggaaacatttaggagacagtttctatttggtggctgaaaccacagaaatgcctgcgacggctctctttgagaatggctgcctcctaggggtatgggtgtgccataagactatcttggagatggagaagcagagatagggccagaataggatggggtcagatctgggctgcaccttgttccctgctggtagtaccctagggttttttttctttcttttttcttccttttttttttttgtagagacagggagttcaaggccagtctggtcttgaactccaggcgtcaagtgatcctcctgcctcagcctcccaaagttctgggagtacaggcgtgaggcaccgccccagcctgatccccgagtcttttgcttggctgagccataaccacgcactcccttgtccccagagccctacagccccgccgtgtgggtgatgatgttcgtcatgtgcctcactgtggtcgccgtcactgttttcatcttcgagtacctcagtcctgttggttacaaccgcagcctggccacgggcaagcgtgagtcccccttcctccatcccccgcctcggagatcccgaaccacagagacagagaactacatttcccagcagcccctggagggggggcggtcaagctagggcctctcgggaggtgccagatgccttgagggccactgggaattgtagttctttctttttttttttttcccttccttattgagaagggatttggggtccatgtccacgtcctggccccctgcaggccctggcggttcaaccttcaccattgggaaatccatctggctgctctgggccctggtgttcaataattcggtgcccgtggagaacccccggggaaccaccagcaaaatcatggtgctggtgtgggccttcttcgccgtcatcttcctcgccagctacacagccaacctggccgccttcatgatccaggaggagtacgtggatactgtgtctgggctcagtgaccgcaaggtgtgtgtgggcccagggctgggctggagctggggctggggctggaggtcacagagcttgtcatgtggtagattagaggggattcttgcggggggcgggggtgagaggggtggggggagggcgggaaggggtctcttcccaaggagaattccagaatggtagaatggaatgttgtggatgaagaaagaacacggttcacgatgagctatttaaaatattcctagggaagagggtgtccctgaatgttctaggggcagttgtgtcaaataggatattctagaaccagtgcttctctcaaactgtgaggaaggattaatttttgaaacttctaaggctggg[138 bp omitted]gtgacaggcacctgtagtcccagctacccgggaggctgaggcaggagaatggcgtgaacccaggaggcagagcttgcagtgagccgagatcgccccactgcactccagccagcgcgacagagttagactctgtctcaaaaaaacaaaaaactgctagtccattgcagacaatgcttttgtaaaattcaacggaaatgaattattagaaaag[143 bp omitted]tgaaacctcgtctctaataaaaatacaaaaattagccaggcgtggtagtgggtgcctgtagtcccagctacttgggaggctgaggcaggagaatcgcttgaacccgggaggcggaggttacagtgagccatgattacgccacaaatagaactgattcctagcctgggtgacagagcgagactctgcctaaaaaaaagccaaactcacatttttatttattagattcaacagacgaaaaagaattctgtcaaatcactctaaatgctcactctctccattcctgtacacatctcactgcaatcaccgtttgttgagggactggtggtttgcagagcatactttgagactaaagtgattaactagctgggtgtcatgacctattagaggcttgagaaatcagtttgatgggttgcaataagcattttttaatggaatggagtagaatagaatagttgcctgcatcttatgtataagtttggttttacaaaacttgttttagttgtctgggcgcggtggcttatgcctgtaatcccagcactttgggaggccaaggcgggcggatcacctgaggttggtagttcgagaccagcctgaccaacatggagaaaccccatctctactaaaaatacaaaactggctgggcatggtggtatgtgcctgtaatcccagctactcgggaggctgaggcaggagaatcagttgaacctgggaggcggaggttgcagtgagctgacagtgtgccattgcactccagcctgggcaacaagagcaagactccgtttaaaaaaaaaaaagtgaactatttctgaacggattggtaaatagcaacagctcccagctcctgccatgccagcctctactcccaggacctcccgcgattcagtaagtgaagacttaacacctggcacatcaggggcctcagggaggcttctcgtgaacttttggatcacgtgtctgcaaccgtgtgtgctgggtgggagtggaaaagcattccctaatgtagtgagcgagtgttgagaaatattgaacactcctgggactggggtgtctgccagatagcgggtgtgtctcagaatgggtgatttatgttagggatgtccctgcggagggtgccctaatcactccccattctgccccagttccagaggccccaggagcagtacccgcccctgaagtttgggaccgtgcccaacggctccacggagaagaacatccgcagcaactatcccgacatgcacagctacatggtgcgctacaaccagccccgcgtagaggaagcgctcactcagctcaaggcagggtcagcgcagactcgggccgggggtgggggttgggccgctggggacctgaggatgctcaaagatggcaaggggtccaggttcattcattcagtcccagaggtcagccctgggtgggtcagcttggagggcggaggtcactgagggtggaagtggactcctcctcccaggagcaggctccttgggatattttctgggatgcagtatttctggattctggggtgagactgatggggctcaaatctttgctcttccccttcttggctttgtgaccttgggcaagttactcagcctctctgaacctctgtttcctcctctgtaaaatgaggataacaagagtatccccactgtaatgatcataaggttgttacaagaattatactagtaagccgggcacggtggctcatgcctgtaatcccagcactttcagaggccaaggcaggcggatcacaaggtcaggagatcgagaccatcctggccaacatggtgaaacctggtctctacaaaaaatacaaaaattagctgggcgtggtggcacgcgcctgtagtcccagatacttgggaggctgaggcaggagaatcgcttgaacctgggagtcggaggttgcagtgagccgagatcatgccactgcactccagcctggcgacagagcgagactccgtctcaaaaaaaaaaaaaagaattaaactagttagtccactcagaacatttatttatttatttagaacagtgcccggtgcactataggtgtttgctgatattatcattatcattagacctgaactcactggaatcaatgcttagattgtgtttcttatctttttacatccctttcccaaatcatagggatgaagttaaattcagaggccaggcgcagtagctcacgcctataatcccagcactttgtgaggcggagacgggcagatcacttcaggtcaggagttggagaccacctggccaacatagtgaaaccccatctctacttaaaatacaaaaattaggctgggtgcggcaacaggctcttgggaggccgagacgggcagatcatttgaggtcaggagtttgagaacagcctggccaacatgatgaaaccttgtctctacttaaaatacaaaaattagccgggcgtggtggcgggcgcctgtaatctcagctgcttgggaggctgaggcaggaggatcgcttgaatgcaggaggcggaggttgcagtgagccgagactgtgccattgcactccagcctgggcaacagagacagactccgtctcaaaaagaaaacaatacaaaaaaagttgagttcaggccccaaagtgcagcccacgaatacaacaaggctgagcacagtaactctctccccgtcctgcatttactcagtccttccgtgtgcatttttcttatcctctgctgtacgctaagcggtgaacaaatagacccgattcctaggtctagaggtgggaaatgaacaataaacatgcaaacagaaaaatcaagatctcttcagaaagtgatggtgagctagagggcggcagggctgggatattttcaccagggtgttcagggtgggcttctcggaggaggtgacatttgtgcagagccctgcaggaggtgaaagagctagccaggtggacttccggaagcagagccttcagacggagggaacagagtgtgcaaagggcctgaggaaggtgcagtgttggtttactggaggaacagcaagaaggccagtgtggttgaagggcaaggagctgaggtgagagagtagatgaggggaggattctgggcatgaggccaaggtcagggctggactttatgctaaaggcggtgagaagccttgaggtgtggagattttacgtaaggaagggtatgatctgatttctgtttttgtttgttttgagacaggatctcactctgttgcccaggctggagtgcagtagttcgatctcagctcactgcaacctccgccttccctgggttcaagcaattctcccacctcagcctcctgagtagctgggattacaggcgtgcactactatgcctggctaatttttgtatttttggtagagatgaggtttcaccatgttggtcaggctggtcttgaactcctgacatgaggtgatctgcctgcctcagcctcccaaagtgctgggattagaggcgtgagccaccatgcctggcttaaaaaaatttctaatgcccaatgcagtggctcacacctgtaatcctaaagctttgtgaggccaaggtgagaggatcacttaagaccaggagttcaa[143 bp omitted]ctcccgggttcacgccattctcctgcctcagcctcccgagtagctgggactacaggcgcccaccac[187 bp omitted]aatattattttgacacgtaatcagtataaacatgggtgagaccgtttacataatttttttccccacacgctgtctttgatatctgtggcattttacactcacagcacatctaggttcagagtgaccacatttcaagtgatccacagccctagtggcgtgtcactgctgcactggaccgcccaggtcgacatcacccaaatgcaaaaagtttcctagtcaacataatgaacagaaaatataaaagggcgctggccgccccccaggaccctgggactttttcacttccttactcacccagagcattctccccagccagcctgctgactcatctctcccccttcccccttcttccgttttcttctcgccagcccttccctccaggaaggaccctgagaattccagattctctcttctctctctctctctctctctcacacaaaacagggtgcctttccaggctgccacctcccacctctgcttcacttgcgccttcctcagaaggcagggatggctgcaaacagaatcactttcctcttttaccccttcagggatacctcacactgccagcctgctcagtccttgcagtgggagagcaagaattcagagactctcagtgggcgggcgggggggatcccattttctttttttgagatggagtctcgctctgttgcccaggctggagtgcagtgctgcaatctcggctcactgcaacctccgcttcccgggttcaagcgattctcctgcctcagcctcccgagtatttgggattacaggcatataccaccatccccggctaatttttctatttttagtagacatgtgatttcact[141 bp omitted]agcaagtggtgagaatgtgactagcaagacagaccagccccatctctcaaaatgaacctaaatctgtccccgccttgagttcagagaaagcaggatacctgtattttttttcccatacaaatgtcagccacatcaccagcctttaataagtaaaaatagctgaggcctcatcccgtgtctttttatagatatttttcatcttttttttattgagatatatacatagatacagtgaggtacagtgaggtacaaaaagcgtgcaactcattatttatacattcatagacatccatgtgaccaggtccagattaaggtatggtgaatttcccggcttctcataaagcttcccctgcccctccagtcaccatagaatatcatataattagttttgcctgattttgaacgtcctctaaacagaatcaaacagtgcatataataccttcctgtctggcttattttcctcagtgttatcaccagattgttccttcattgctgaataccgttgagtataccattatataaatataccataattctttcattctactgctggtggacattcaggttattgccagtgtttggccattatgaatattgctttttttcttttctcttctttctttttctttctttctttctttctttttttttttttttttctgaaacagagtctctctctattgcccaggctggagtgcagttgcgcgatctcggctcactgcaatctccgtctcctgggtttgagcggttctcctgcctcagcctcccaagttgctggaattacaggcgcctgccaccacgcccagctaatttttgtatgtttagtagagatggggtttcaccatcttggccagactggcctcaaactcctgacctcaggtgatccaaccgccttggcctccaaaagagctgggattacaggcataagccatcatgcctagctgaatattctcttttttaaacatgtgtaattgcctcttttttttttattttttatttttatttatttatttattttttcagacagagttttcctctgttgcccagactggagtccagtggtgcaatctctgctcactgcaacctccacctcccaggttcaggcgattctcctgcctcagtctcctgagcaggtgggattacaggcacacaccaccatgcccggctaatttttgtatttttagtaaagacggggtctcaccatgtt[135 bp omitted]tttgggggacatacacattccttttccttggttgtattcccataggtggaactacccggtcatagggagagtatgcttagctataacagatactgtcagacatcttccaaaacagttaggcacagtggctcatgcctgtaatcccagcactttgggaggctgaggcaggcaggtcacttgaagtcaggagttcgagaccagcctggccaacatggcgaaaccctgtctctacaaaaaaatacaaaaattagccaggtgtgctggcaggcacctgtaatcccagctactcaggaggctgaggtaggagaactgcatgagccctggaggcagaggttgcagtgagccaagaccacaccactgcactccagcctggctgacagagtgagactccctctcaaaacaacaaaacaaaacaaaacaacaacaacaaaaatccaaagtggttgtaccaatttacactctcatcagcaatgcaagagagttctacttgttccatat[138 bp omitted]cctccgcctcctgggttcaagcaattctctgcctcagcctcctgagtagctgggattacaggcatctgccactatgcccgggtaatttttgtatttttagtagagatggggtttcacca[141 bp omitted]tatcaagtcctgttctaactaatttaagttcacaattagtttgcaaaaaattaatcaaatcaatgttttgattcatagtcctggaggctaggcatcctcttggctccttcagagggctgtgagggaaggatctgtccaggcctgcctctccttggctgttgactcttgatccctgtatctcttcccatcatcttccctctgtttgtgtctctgtggccaagttcttttttttttttttttttgagatggagtgttgcccaggctggagtgcagtgacatgatctcggctcactgcaacctctgccctctgggttcaagtgattctcctgcctcagcctccttagtagctggtattataggcatccgccaccacgcctggctaatttttgtatttttagcagagatgggtttttgccatgttggccaggctggtctcgaactcctgacctcaggtgatatacccacctcagcttcccaaagtgctgggattacaggtgtgaaccaccgaacccagtcaagctcccccctccccctccccgctttttttttttttaattgagacggactttcactcttgttgccccggctggagtgcagtggcacaatctcggctcactgcaacctccacctcccgggttccagtgattctcttgcctcagcctccctcctgtagctgagattacaggcgtgtgccaccaagccccgctaatttttgtatttttagtagagacggagtttcaccatattgctcaggctggtctcaaactcccatcctcaggtgatccgcctgccacggcctcccaaagtgcttggattacaggcgtgagccactgcgcccggcccaagttcccctttttataaggacactagtcatactggattagagcccaccttaatgatctcattttaactggattccctctgcagaggccctatatacaaataaggtcgcattctgaagtactaggggctaggacttcaatatgtgaatttggtgagggaacacaactaaacccttaagacctcataaaaaatcttaggtgggtatgattggaaacatgaggagcagcaagcttcttgcatctgctaagtggcagaactaggactggaaccctggcagcccagttctacagcccaggttctcaccactaggctatattgcctcacatgtgcactgagtaacccagaatcactccttttgtccccctccctagaagcttcatgattcacaaaggacacccctgtgtttctcattgtcatctcttgctctaatttcctgcttctgctgaattctttttctccagtatcccttgttactttttcttttttttctaatttttagttctatatttatcagagttctccatccacatagtttggagagtcagatacaagaatttcagtttagtttagtttggtttgggagtcaaggtcgcactctgtcacccaggctggagtgcagtggcatagtcacagctcattgcagcctcaagctcctgggctcaagtgatcctcccgccttagcctcccaagcagctgggactacaggtgtgcacccccacatctgattaattttattttatttatttatttttttgagatggagtcttgctttgtcacccaggctggagtgcagtggcgtgatcttggctcactgcaacctctgcctcctgggttcaagtgattctcctgcctcagcctcctgagtagctgggattacagaagcctgccaccacgcccagctaacttttgtattttcaatagagacagggtttc[132 bp omitted]gtgtgtgtgtgtagagatggggttctcactatgttgcttaggctggtcttgaattcccaggctcaagtgatcctcctgcctcagcctcccaaagcaccaggattacgggcacgagccaccgtgcctggaaagaattttatctttaaggaaaaaaatggcaccctccatttctctcagcccagaggaatctactttcaccttgtttattgtatcactttgtgatttatctccctatctctaaataccatgtttgcatgactacctcttgatttttcaattttaggcatttttccatccgcttctcactatggaagacatactcatactcttatttaaatcaattcagcctcccacattgtgactctgacagatgaatattcagtgtttacatgttatgactatgtaaatgctctcacagctgccacagtagtaaaccgtgattactttcctctcctacacaattctttgtttttctttcttttttttcttgagacagggtctcactatgttgcccaggctggagtgcagtggcgtgatcttggctcactgcaatctgtgcctcccaggttcaagtgattctcctgcctcagcctcccgattagctggactacaggcgtgcgccactgcgcctggctaattttggtaattttagtagaggtggggtttcaccatgttggccaggctggtctcaaactcctgacctcaagtgattggcctgcctcagcctcccaaagtgctacgattacaggcgggagccatagctcccagctgatagggggtttcaccatgttggccaggctggtctcaaactcctgagctcaagggatctgcccacctcagcctcccaaagtgttgggattacaggtgtgagccaccatgcctggtctatttttcttgaggttagtaactgtcttttttctttttctttcctttttcagttgcttcatggctgtgttttctttgtggttaactaattcaaacccaaattatctgtttactgtctaaatctcttcttggtatgttcagaagtatattaatatacttaatatgttagaagtatcagatactctgttaatttcttttttcttttttcttttttttttttttttgagacagggtctctctctgtcactcaggctggagcacagtggcacgatcttggctcactgcagcctctgcctcctgggttcaagcgattctcatgcctcagcctcccaaatagctgggattacagtcgtgcaccaccacgcccagctaatttttgtattttttgtaaagtggggtttcgccatattgaagagcttggtctcaaattcctggcctcaagtaatctgttcacctcggcctcccaagtgctgggattacaggtgtgagccactgtgcctggccttgtcaatttcatcttattgaagaagttgctcttatggccttctggcctgctccagcctgggcatagccgccatcttgggatcacctttcaccttcatcccttcatctctggtttggatcctgttgtagcacaaattctaactctttctgggttttgcttccttgttcttttgagcttcctgacagaggcacatagcgggtatatttttggagacattgcaaatctgaaaagtctttttttctgtccttgtacttgatggacagtcaggctgggtatagaattctgcattagagctcattttccttcagaatttggaagagtcactctattgttttctaatatccagtgctactgtagagaaatccaagatcattctgattcctatgcctttgtatgtaacctgttgtttcttttccttgtccttggtggactgacatttatcagtgacatgccttgatctgtttcccttttttttttttttttgagacggagtttcactcttgttgcccaggctggagtgcaatggcacgatctcagctcactgcaacctccacctcccaggtacaagcaattctcctgtctcagcctcccaagcagctccgattacaggcatgtggcaccatgcccagctaatttctttgtatttagtagagatggggtttcaccatgttagtcaggctggttgcaaacttctgacctcaggtgatccacccgccccagcctcccaaagtgctgggattataggtgtgtgccaccgcgcccggcctgctttcctttcttttcttttatcttttctttattttttatttttttgagacagagtcttgctctgtcaccaggctgaagtgcagtggcgtgatcttggcttactgcaacctctgcctcccgggttcaagccattctcctgcct[226 bp omitted]atgttttccaggctggtcttgaactcctgggctcaagcgatcctcctgccttggcttcccaaaatgctgggattacaggcatgagccatgcgcatggccattgatctgtttccgttgctgggtctttcaatcgtattctcatgtcatttgttctgagaaaatttcttgaattttcttaaattcttttatgtacaatatctccctctccttcatttctctgtttgtttatttatttatgtttagagacagggtctcactctgttccccaggctagagtgcagtgaggcaatcatagctcactgcagccttgacatcctgggctcaagcaatcctctcgcctcagcctcccgagtagcttggactacaggtgtgtgccactttcgtgtagagacgggggtctcactatgttgcccaggctgctcttgaactcctaggatcaagcgatcctaccaccttggcctccaaaagtgttaggattacaggtgtgaggcaccatgcctggccagaaactggactttctttttttttttttttatttcattttgcttttttttgagacagagtcttgctctgtcacccaggctggagtgcagtggcacgatctctgctcactgcaacctccacctcccgggttcaagtgattctcctgcctcagcctcccgagtagctggttctacaggcgcccgcaaccatgcccagctaatttttgtattttcagtagaggtggggtttcaccatg[131 bp omitted]tgggaggacgagaagggcggattgcctgaggtcaggagttcaagaccagcctgaccaacatggtgaaaccccatctctactaaaaatacaaaaattagccgggcatgatggtgggcgcctgtaatcccagctactcgggaggctgaggcagaatcgcttgaacccgggaggtggaggttgcagtgagctgagaccagcacattgcactccagcctgggcaacaatagcataactctatctcaaaaataaaaatagaaaataaagaataaataaataaaatttaaatgcaaatagccatatgtggcgagctagtggttgccatagaggacagcactagaaaattccatctttacagtgaggcacaagggagaggcagctcccagggctctggccggctcgcaggccaaacgtgggctcaccctaccgcttccggcaagtaaccccacagggggagaaaggaaatgcacgtcctaaaaagaaatagagaaacacagcttctcctcccagccagttcttggtgccctttccatgagagatgtgcaatttctcactcactcaagaggggcaaaaaaggaaatatcaaggcccctttccgtaatgtaagcattatttttttttcttttggatcaattaaaatatggatgcattcacactcacacattccaaactaacagtacacactgttctcatcttgcctttttccacggagaaagcccttttggcatcttttctgtgttaatggaatcctacttctcagctccagtgtctgggccatggaaggcctcccttggaccagtctgagtttactcatttggccgcttcttttctttttttttttttttgagatggagtctcgctctgttgcccaggctggagtgcagtggcgcgatctcggctcactgcaggctctgcctcccgggttcataccattctcctgcctcagcttcccgagtagctgggactacaggcgcccgccacctcatccagctaattttttgtatttttttagtagagacggggtttcaccgtgttagccaggatggtttagatctcctgacctcgtgatccgcctgcctccgcctcccaaagtgctggcattacaggcacaagccaccgcgcctggcggccgcttcttctattttcttttgagatgcagtctcgctctgtcacccaggctggagtgcagtggtgtgatctcagctcactgcaacctccacctcctgggatcaagtgattctcctgcctcagcctcccgagtagctggaactacaggcacacgcaaccacacccagctagttctttttatttttagtagagatggggtttcaccatattggccaggctggtcttgaacttctgacctgagatgatccgcccacctcagcctcccaaagtgttcttgggattacaggcgtgagccaccatgcctggcccacttcttttcttttctttcgaacttcttttttaaaaatttttaattgtatttttttttttacagatggtctcactatgttgcccaggctggtctcaaactcctggcctcaagcaatcctcccaccttggcctcccaaagcgatgggatgacaagcttgagtgaccactccctacctgaacttttgttaaatttattcctaaatattttattttattttattttttatttttttgccagtgtcaaactcctgaccccaaggaatctgctggcctcagcctcccaaagtgctgggattataggcatgagccaccgcacccagcctggaattgttttaatttcattttaattgttcattgctagtatataggaatataatttatttcacatattttgtaatttatttcgtatattgatcttgtatcatgaaccttgttgaacttctattagccataataatttttattgtggatcctttgggatttttctatatacaattctattaattcgctagggcagccataacaaaataccatagactgagtggcttacacaacagaaatgtatcgccccacagttgtagaggctagaaggtcaaaatcaaggtgtcggcagtgatggctccttttgagggctgtgggaggacctcttccagaccttcctccttggcttgtaaaaagctgccgtcttcctctgtctcttcaccttgtctaccctttaagtgcccattcagccacttgtttttttttttttttttttgagacggagtcttgctcttgctccattgcccgggcaccatctcagctcactgcaacgtccgcctcccaggtttaaacaattctcctgcctcagcctcccaagtagctgagattacaggcgtgtgccaccacacctgactaatttttgtatttttagtagcaacagggtttcgccatgttggccaggctggtcatgaacttctgaactcaggtgatccgctcgaggttcaagcaattctcctgcctcagcctcccgagtggctgagattacaggcacatgccaccacacccggctaatttttgtatttttagtagagatggggtttcactatgttggccaagctggttatgaactcccgacctcaggagatccgtgccccgggcggcctcccaaagtgctggggttagaagcatgagccaccacacccagccgtccagccatttcttagtaagcacctagtgtgtgctaggcactgttctagaccctgtggatacagtggtgaatcagacgggcaaagtccctgcctcatggaacttaaattccagtgaagggagacgtgcaatgcacggaataaatgagaatattctatagtgcattccaaggggatacgcgctatgggtaaaaatagggcagggtgaatgcatttggaaaactggggcgggagactggaggttgcagtatcaaatagggtgctcaggaaggtgtctttggagcaaacacctgacggaggttgtaactgcccagtgggttcacgttgcccgctgcctagacagagccgatttatcaagacggggggtctgcaatggaaaaagagtcattcacgcagagccggctgtgtgggagaccggagttttattatcactcacatcagtctgcctgagcatttgggaaccagagtttttaaagataatttggcgggtaggggcttgggaagcggggagtgctgattggtcaggttggagttggactcacaggcggtcgaagtgaggttttcttgctgttttctgttcctgggtgggatggcagaactggctgagccagattaccagtctgggtggcgtcagctgatccatagagtgtagggtctgtagaatatctcaagcactcatcttaggttttacagtaatgatgtcatccccaggagcaatcgggggagccagaggctgcatggcccctaaccttaatttctaatcttgcagctaatttgttagtcctgcaaaggtagactagtccccaggcaagaagggggtctttttaggaaagggctagtatcgattttgtttcagagtcaaaccatgaacagaattccttcccaaagttggtttggcctatgcccaggaataagcaaggacaacttaagggttagaagcaagatggagtcagtcaggcaaaggcactttcaaggtgagagagtgagtcaggcagctgtctaggagaagaatgttccagcaggcagaacagccagtgcaaaggccctggggcaggagcgagctggagaggtccaggtgcatctcccaggccagagtgagggggggcttgggagatgagggcagatgggtaaggagggatggggtgtcaggtggcacagggcctctaaactcgaggtgatccaagtcactctgagtgacgaggggagccaagagggggtggtgagctgaaaagggacagcgctgactcaaatgttaagatccctctggtgacagagtgggaacaaacaagaaagaaaggacggatgcagggaattttaatttttccccaacctacacccaaacaaaggctgtaggaaatggctgaggtctttttgttttgttttgttttgttttcgagacagggtctccctctgtaacccaggctggagtacatggcacaatcatagctcactgcaacctcatcctcctaccctcaagcgatcctcccacctcagcctcccaagtagctgagatgacaggcatgcaccaccaaacccggctaatttttaaagtttttgtagagacaggtctccctttgttgcccaagctggtctcgaactcctggacccaagcagtcctcctgcctcagcctcccaaagtgctgggatgacaggcatgagccagggcccctggaatggctgagttttaatagatatttagggaccatgaaggggtggtggatgcgagaggggagggagacagtatatcccagaaaaactgagcaaaccattgaaagtgaatgctgttagagctcctctttctgaaatctctcaaatatttccaccactggaagccttgacttttagctttctccaaaatgtaacttgagtctctccttccactcccgcttgtcctctgaggacccctggagacactcctcccatcttatcccagtcccagcccttctatccctaactctagaaactccacattcttcccacttaaacatcaatagcacttcacctttcacccccaagggcatcttcctaaacaaagagaaacgtagggaaaaattacagtttgcctacaaggcagaagtgcctgcaggcagtggtggtatttttctcgcctatacttatattccagatgtcatatgggaactccctgttaggatctatataaaattaattcaaaccccattctccaacggtgggatgatgaatgtcctccccacgtttctgctaattctccggagcttcacattctccacccctgagtctttgcttcagctagagacattcaatttgggggatccacttcctgtctgtttccccacttagcatgtatggactaattcagtccttttctctaatttccacgcaaacaaccacacacacacggcatttatatgtgagcctgtgagtgcgtggacagggtttttctgaaggtttggggacataggaggacttaaatcaacagacaggctaactactcaagactagaggttaagtattcttctctggaagatcctttggcttctcttcaactcagcatccagccgcctttttttttttttttttttttttttttttgagacggagtcttgctctgtcgcccaggctggagtgtagtggtgcgatctcggctcactgcaacctctgcctcccgagttcaaacgattctcttgcctcagcctcctgagtaactgggactacagatgcctgccac[175 bp omitted]ttcgccatgttggccaggctggtatcgaactcctgacctcatgtgatccgcccgcctcagcctcccaaagcgctgggattacaggcgtgagtcactgcgcccggccaatatgaactcatattctatataggattctgggagtaatttttgtgttcatttgttttgtttttagagacagggtatccctctgtcacccaggctggggtgcaatggtgtcatcatagctcactgcagcttcaaactcctgggctgaagggatcctcctgcctcagcctcctgagtagctgggaatataggtgcatcaccacacctggctaatttttttttttttttatagaggcagggtatcactatgtggcccaggctggtctcaaactcctgggctcaggcgatcctcctgccttggcctcccaaagtgttgggattacaggcatgagccatcatgcccagcctaactttttaaaaaatacaccccataaggtcaggtgtgaaagctcatgcctgtaatcccagcattttgggaggctgaggcaggaggattgcttcagcccaggagtttgagaccagcctgggaaacagagtgagaccccatctctaaaaacaaacaaacaaacaaataaataaataaatatttaaaaaatatataaaatacaccccatacatccttacctgtcagagcataagcatttatctcataccacagaagagttacacagtattcctctgtgtggattcatttattcattcattcatttattctgcaaatatctatcaaccccgtcctacatgccaggaactatgccccagccacagatgagaataagaccaactgggaccctgggggtcttgcagtctcatggggaaggttgagattaatcaaacaaccacagaaataaatgtaaaatgacagcagttgtaaatgagagtgatagcagcatgtgccataacaaatgcatccatgagaactaactccacagccctgcccttcttcccaccaagtcttagaaatcagggcctaggctgggcacggtggctcatgcctataatcccagcaccttgggagaaacccactttgggaagccaaggtgggacgataacctgaggttgggagtttgagaccagcctgaccaacatggagaaaccccatctccactaaaagtacagaattagccaggcgtggtggcacatgcctgtaatcccagctactccggaggctgagacaggagaatcgtttgatccggggaggcggaggttgtggtgagcccagatcgcaccattgcactccagcctgggcagggcctaggccaagtgtggtggctcacgcctgtaatcccagcattttgggaggctgagttgggtggatcaactgaggtcaggagttcaagaccagcctggccaacatggtgaaaccccatctctactaaaaatacaaaattagccgtgtgtggtggtgcatgcctataatcccagctacttgggtggctgaggcaggagaatcccttgaacctgggaggtggaggttgcagtgagctgagatcacgcctctgcactccagcctgggggacaagagtgaaactcggtctcaagaaaaaaaaaataaataaataaataaatcagggcctagtgggagaacccaagcaagttatgtgtctgggtctgtgttttcccatctgaaaagaatggttatctccctacaggctcacacctgtagtcccagtactttgggtggccaaggcgggaagatcacttgagcccaggagttagagcccagcctgggcaacatggaaaaaccctgtctctacaaaaaatacaaaaattagccagatgtggtgatgtgtgcctttagtcccagctactgaggaggctgaggcaggaggttcggttgaaccgaagaggtcaaggctgcagtgagctatgatggtgccactgcattccagcttgggcaacatagtgagacctcgtctcaggaaaacaaaaaaaaagtgtccttagactagatagaacaatgcttggcacaatataactgatcattcacttgcattatttttttccctcaatcttcctctttatttgttttgagatggcatctctctctgtcacccaggctggagtgcagtggctcgattttggctcacagcaacctctgcctcccaggttcaagcaattctcctgcctcaacctcctgagtagctgggattacaggtgcctgccaccacacctggctaatttttgtattttcagtagagatggggtttcaccatgttggccagactggtctggaactcctgagctgacaggtgatccacctgccttggcttcccaaagtgctgggattacagccatgagctaccatggccagtctcaatcctcttttttaaaatgcaagagtaaatggactctttggagggctatggtgaggagtaaaggaataactatttcattaacagtcacagctggccaggtgcggttgctcacgcctgtaatctcagcactttgggaggctgagacaggtggaccacaaggacaggggttcgagatcagcctggccaacatggtggaaccccgtctctactaaaaatgcaaaaattagctgggcgtggtagtgggcacctataatcccagctacttgggaggctgaggcaggagaatcgcttgaacccaggagtcggatc[136 bp omitted]tactatctaagctttccctatagtccctgctactggggaggctgagataggaggatcgcttgagcccaggatttctggtccagcctggacaacatagcaagaccctgtctcttaaacaacatacttttgcaacaactctgaagggagatactgctgccatgcccattttactgatgttgaaactgaggcactgagaagtgcaatgatttgctcaagagctcagggccagttaggatttggagcagttggaggttacaggtgaggaggttccaggcctggcggccagggcatctaggtgggactgaccctaccctccattccccctccccccaggaagctggacgccttcatctacgatgctgcagtgctcaattacatggcccgcaaggacgagggctgcaagcttgtcaccatcggctccggcaaggtcttcgccacgacaggctatggcatcgccctgcacaagggctcccgctggaagcggcccatcgacctggcgttgctgcagttcctgggggatggtgcggctgcacacagggatttccacagcggagagggggagggcgaggcccctgggttccggggaagaaagggacaaagacccggacaccagggtctgagggaggaaggggctaagggcctacattcccacatcacagacaagggtcctcagagggtactcatagcaggtgacttttgaccgcccctccctagatgagatcgagatgctggagcggctgtggctctctgggatctgccacaatgacaaaatcgaggtgatgagcagcaagctggacatcgacaacatggcgggcgtcttctacatgctcctggtggccatgggcctgtccctgctggtcttcgcctgggagcacctggtgtactggcgcctgcggcactgcctggggcccacccaccgcatggacttcctgctggccttctccagggtatggggcagagagggaggcagagagggggagatggcaggggcggggacaaaggtaaagccgagcagagacaaggagatgtgggtcgagatgtggatagtggggaagagagcgggaaacacaggcgggtaaatggagaggagagagggactgaggggaggcgggcaggcgtcctgggcatctcgcgctgacccccgtcctgtccccggacccgcagggcatgtacagctgctgcagcgctgaggccgccccaccgcccgccaagcccccgccgccgccacagcccctgcccagccccgcgtaccccgcgccgcggccggctcccgggcccgcacctttcgtgccccgcgagcgcgcctcagtggaccgctggcgccggaccaagggcgcggggccgccggggggcgcgggcctggccgacggcttccaccgctactacggccccatcgagccgcagggcctaggcctcggcctgggcgaagcgcgcgcggcaccgcggggcgcagccgggcgcccgctgtccccgccggccgctcagcccccgcagaagccgccgccctcctatttcgccatcgtacgcgacaaggagccagccgagccccccgccggcgccttccccggcttcccgtcgccgcccgcgccccccgccgccgcggccaccgccgtcgggccgccactctgccgcttggccttcgaggacgagagcccgccggcgcccgcgcggtggccgcgctcggaccccgagagccaacccctgctggggccaggcgcgggcggcgcggggggcacggggggcgcaggcggaggagccccggccgctccgcccccgtgccgcgccgcgccgcccccgtgcccttacctcgatctcgagccgtcgccgtcggactcggaggactcggagagcctgggcggcgcgtcgctgggcggcctggagccctggtggttcgccgacttcccttacccgtatgccgagcgcctcgggccgccgcccggccgctactggtcggtcgacaagctcgggggctggcgcgccgggagctgggactacctgcccccgcgcagcggtccggccgcctggcactgtcggcactgcgccagcctggagctgctgccgccgccgcgccatctcagctgctcgcacgatggcctggacggcggctggtgggcgccaccgcctccaccctgggccgccgggcccctgccccgacgccgggcccgctgcgggtgcccgcggtcgcacccgcaccgcccgcgggcctcgcaccgcacgcccgccgccgccgcgccccaccaccacaggcaccggcgcgccgctgggggctgggacctcccgccgcccgcgcccacctcgcgctcgctcgaggacctcagctcgtgccctcgcgccgcccctgcgcgcaggcttaccgggccctcccgccacgctcgcaggtgtccgcacgccgcgcactgggggccgccgctgcccacagcttcccaccggagacaccggggcggggacctgggcacccgcaggggctcggcgcacttctctagcctcgagtccgaggtatgacgcggccccgggggccccaccgcccccttggtcagcgcaggccacggcccgagggggcgcccgcagtggacaggacccgcgtgggttgggaaggaaagcagtggaactggccggaccccgcctggagcagcgtcctgcgccccctggttctggaggaaccgcaagccggagaggatttggtccctcaactatcacccagcctgagaacgagggggcgggggccttggagcccaccggacttttttttaaacccgacaagggctttttaacgtcaccagatggggcgggaggtggggggttcacgccactcccgcgtcccacctccacgcccggggccgtggcccccacatcactgtgcagctccccggccccagccgcgcctccggggaagcccgtttttaacctttcatccattgggactcaaaactgtgagacgcgttcgccaaactgtgaccccagaccttggccccgccacacagaaacccctgacccagactgtgacatccgactcctaaaatggtcatccgactccagactgtgacccctgaccccaaactgtgacccgaaccccagactgtgccccgaccagactgtgacccttgacatcaaaccgtgacaccccctcctcctcttccaccctcggtcgcttttccctactctgacctaggacacgtccccaacggaagccccgccttcccttgcaccgcgatgaacccaacctccctgaagccaaaacttcccaccctgccgcacctccggaccaccccacttgccaccaagcacatcctctccaaatccaacccttatttgcgacccttcagtgatgacccagcagacctccaaaaagcctcctctgcccagatctccagccgggtctggggctgggttgcggaggggagggtctgggagtccacacttctccaccaacttcccttcccactctcttattccacattgcagtgtttggaataaaccatgtttttatgcctcctcagtccaagcctaagctccgtatctgttagcccccctcaaattctctggaggaaacagaaacacaaaagtcccacaggggaagaggagacagaattagagagagaacagagactctgaaaggaggtgcctggggagacaaagaccaagaaagaggaggtgggaagagaccctgaaaagaaagtcgagagggtactggggcagataagagaccccaagagagtggtgagatagatcccggagacaaaacatattaagatcaaaggtatggttttatttcctatggctataggtaccaaggcttgctacattctcaatatcctgttcatgcaagctaggagagtgtctgacatatcccagccaatccgcattatcttgaatgctgttaatctcaccaatgagaatctatttctaacatttcattatgtcaattagccaaaccgctggtgctgatgggcgataaagagagacgaagcacttgtaatagctgcctccagagggtggactttctgattaagtgctcgctgaccagagctgaaatgtgaatgtctggttaggcaattgactgcccctagagggtagattgaaccgcctaacttacagataatatccatcctgtctacaagaaagcatttttgaaacaaatgaaagccatcacaacagagagaggaaaagaaaccggccttatgggtcctcggggagtagaaactcagtctccttgccagtgaaagagcaaatttgcatatatgaataattaattaactggaaagaacgctctcggaatcaaactggacaatggggaaaacaagcctcccgtagaactacaactcccagaaggccttgccactaccgcgaggaacagcgcccaaagtcacgcgaagatgcagtttctccgtatccgcaggcttctttcgctggcgccattacctgagttctcctccagcgtttccgcaccctctccgattagcggtcccaggagtttccaaggtaaccgcgcagtagggcggatctcattaggcggaaagcgaaacccggaagtgacgctcttaccgggtgtcagcagcgagagggttcgaagatggcggcgcgcaagggtcggcggcgcacgtgtgaaaccggggaacccatggaagccgagtccggcgacacaagttccgagggcccggcccaggtctacctgcccggccgggggccgccgctacgcgaaggggaggagctggtcatggacgaggaggcctatgtgctctaccaccgagcgcagactggtagggctgagtccggactccagggtcctgaggtggctgatcccgagcctttaacctgagaggtgctcgggaagagaaggctggggtctaagagaagtgatttcataccggaggcggttgatccatgagggaggtggggactgagctcttactgtcccgtcttaactcgtaaaccccgccttccatccccaggcgccccctgtctcagctttgacatagtccgggatcacctgggagacaaccggacagagcttcctcttacactttacttgtgtgctgggacccaggctgagagcgcccagagcaacaggtaagacccgaggcttttccaggaccaggaggctcagtttccagccccttcctcagcacccaggagttagggcttccagtttctgcctctcgcagatccaggagtctgggtttccagcctctctccttcctaagaatcctggaatctagtgcctaactcaccccacaatttctcccagactgatgatgcttcggatgcacaatctgcatgggacaaagcccccaccctcagagggcagtgatgaagaagaagaggaggaagatgaagaggatgaagaagagcggaaacctcagctggagctggccatggtgccccactatggtggcatcaaccgagttcgggtaagtatggtcccaggagcctgctctgcatactctgaaacacatctgacccatcccctgtgtccataactcccaacacctcctcatgttcttttttttttttttttttttgagacgtagtctcgctctgtcacccaggctggagtgcagtggcgcagcctcggctcactgcaacctctgcctcccaaagtgctgggattacaagcgtgagccaccgtgcctggcccattttttttttttttttttttgagatggagtctcgctctgttgtccaggctggagtgcagtggtgcgatcttggctcactgcaacctccccttcccaggttcaagggattctcctgcctcagcctcccaagtagctggggctataggcgcctgccaccaggcccttctaattttttgttttttggtttttttttgagatgaagtcttgctctgtcgcttagactggagggcaatggcatgatctcagctcactgcaacctctgcctcccaggttcaagcgattctcctgcctcagccaagtagctgagattacaggtgcgcgccaccacgcccggctaatttttgtattcttagtagggacggggtttcacaatgttgatcaggctggtggtgaactcctgacctcgtgatccgcctgcctcggcttcccaaagtgctgagattacaggcgtgagccaccgcatctggccaattttttgtatttttagtagagacaaggtttcgccttgttggctaggctggtctcaaactcctgacctcgagtgattgatccgcacgcctcgggcacccaaagtcatgggattacaagcgtgagccaccacacccggcctccttcagtttttagaaaagtacttgtcacatagttttatacaatttagctattatgatcagtgtcattacatgttaggtactgttttagattatgaggatatggtttatgttcttcacttttctctttggtaacatagtgagttatagaacttatctgatggggctggcatgaggtcaaatgaaataacatatagtgcctagaatagcacctggttgtaatatgaggtatgtattttctgttactattcaggaactgtttttggttgtggctgtttgttttgtttttgagtcatggtttcactcccattgcccaggctggagtgcagtggcgtgatcttggctcactgcaacctctgcctcccaggttcaagtgattctcctgcctcagcctcccgagtagctgggatcacaagtgcacaccaccatgcccagtaatttttgtatttttagtagaaatggagtctcattatgttggccaggctggtcttgaactcctgagctcaagtgatctgcccaccttcgcccccaaaatgctgggattataggcatgaggcactgtgtccagcctgtttatttgttttttgcttcaaagctaaaacatcttctgatcaggtagacttgtaagtacaatgatacggtatatgaagagcacttagagcagtacttggctgatagctggggctgtctgtttccatgaaattatttttactatgtttcagtactgttctagatgcagaggatttagcagcaagcaaaaggtctctggctccatcaacttacacactagtgggggaagggaacgagatgaaactaagtaaatgtgtaccatgtccaaaggtgttaactatcctggaaaaaatccaatgaagtaggggaagagggttagggtgctccaggagtggggtgctatttttaaacagtgtggttaggaaagtattctgtcataaaatgccatttgcatagatactcacaggtagtggggcagtgaaccctgtaaaagaatttgcaggcaaggaaaaacacaagttcaaaggccctggggtgagcttggcatgtttgaagagtttcaagtgaagcgggagtgtccagtctgtctggagcagaatgaacaaaagggagaatgacacaatttggggagcgggcacagagaagacattgttcagagccttgtcggccactgtaaggactccagcttttaattgggagacgttggagggtttcaggcagaggaaagacagggtctgacttctgttttaaagtggtccctctggctgctgtccttaaatatcaattgcagagaggtaagggtcggaggaaagaatcctgtggggagacttacggtattcaggggaaggatgacatcagtagtagtgtgacagcaatagacatcatgagaagggggttggaagtgagcttttttttttagatgagacagagtctcgcttttgtcgcccaggccggagcgcaatggtgcgatctcggctcactgcaacctctgactcctgggttcaagcgattctcctgcctcagcctcctaagtagctgggattacagccacccaccagcacgcccgactaatttttgcatttttagtagaggcggggttt[131 bp omitted]cataggtgctgggcatgaggaccaagaatgagttctgaattttggggcctgaggtggagagagagcagttgcaggtggcaattaggagcttggctttggttgtatcaagtttgaatggtcaggctggcacagtggctgatgcctgtaatcccagcactttggaaagctgatgcagaaggatcgcttgagaccaggagttccagaccagcctgggcaataaagtgagaccctgtctctacaaaaaaattttaaaagccagatgtgatggtgcttacccatagtcccaactacttgggaggctgaggtgagaggatcacttgagcccaggaggttgaggctgcagtgagccattatggcatcactgcactccgtcctgggcaacagagcgggaccctgtctcaaaaacaaaaaagtttgaacggtcaatgcagtaagagtctggagcccaggggagaggtcagggctaggggtattggaaacctcgtggctggactgggtctcctagtgaacaaacacagaggcaaggagatccgaggactgagtcttgtggccttctagcatttagagggttaccgagaccaggagcctgaacaccctcccaagggctggtgggaattgcagcctcaactcccaggcatcctggggctctatcctcccacctcagctcccccacccactcccaccccctgtggagagctgtcccagttaccatgctggtttttgcaggttgtgattttcttcccacagaggtttcaaggagctgtagtcccaggcctgggagatctgaggaagcgcacttctggttctctgggatatggggagcgtggggtcagtgccttgatcctcctctcccctcgcttcacatcacccttcccccaccgctcttctgcaggtgtcatggctgggtgaagagcctgtggctggggtgtggtcagagaagggccaggtggaggtgtttgcgctgcggcggcttctgcaggtggtggaggagccccaggccctggcagccttcctccgggatgagcaggcccaaatgaagcccatcttctccttcgctggacacatgggcgagggctttgcccttgactggtccccccgggtgaccggtgagtccctggggtgttcaggagtcccgggaggtcgggggagcagggtctgcaacaaggggccgggcgcttagactccaaggaggggagcgagctgcggccaggtggggcgaggtcatttcctgactcccttccccaggtcgcctgctgaccggtgactgtcaaaagaacatccacctctggacacctacggacggcggctcctggcacgtggaccagcggccattcgtgggccacacacgctctgtggaggacctgcagtggtcaccgactgagaacacggtgagggagggtggggttctggtcgtttagttctgatggattctaggccagggacctagaatcctaggtctgagggaaaagagggctgggagcctgacggaggtttagtttccaggccaagtcatagtaaggggaacagtgaaagagagagtagcccaccgctggcgcttgggcttcactgcgggctggggggcattgggaccactcagactccgcctcccccaggtgtttgcctcctgctcagctgacgcctccatccgcatctgggacatccgggcagcccccagcaaggcctgcatgctcaccacagccaccgcccatgatggggacgtcaatgtcatcagctggagccgccgggagcccttcctgctcagtggcggggatgatggggccctcaagatctgggaccttcggcagttcaaggtattttcccagccggacacctgggggctagagaagcttgctcccagcagcccctgggatttgtaggatttttcctccttgaatagttttacacaaccagagctggagagcccttagaactagactcctgcctcttcagggtacagaggaggaaactgaggctcagcaagaggaagggtggcgggtctccactcttggggtcactcactctaccaggggaacagctgacaagagatggaaggggctggggcagcagagactaggactctcatctgcctgtgggcagaagtacaggtgtctgtacggccagtgctgagagcttcagagagttgtagatttctagatgcaactgagaatcggggcccagcctgctcgttgtaggagaagactgaggcacagaaaggacaggagccgctgtgacatgacagccaagctagaggttgacattgtggagctgggagggtccctgtgcaggagaagttgcagcgtccggcatccctctggacaaagccgcagctttgtgtggctctgccttcccgggctgccatgatgtcatcctttttctcctccagtttgatcgtttctatagcgtcagccctggggaggaggctggagacggattccagcctcccaggcccaccaggtcacacagggcccagcttgttgaccattggaacttcagagcagcctctcctaatgagagagacgccaattgagcggggcctttgctgtagtgaaagtgctgtcattcttagtctttctttgggtcggcttccggggattgtgtttctgcctcctttgaggcctttgtagaatctgctgggagagctctgggagagccatgccctcctttttttctttttttttttttttttctttttttttgcgatggagttttgctcttgtttcccaggctggagtgcagtggcgcaatctcggctcactgcaacctcccgctcctgggttcaagcgattctcctgcctcagcctcctgagtaactgggattacaggcatgtgacaccagcccggctaattttgtatttttagtagagatggggtttcaccatgttgttcaggctggtctccaactcctgacctcgggtgatccacccgccttggcctcccaaggtgctgagattacagtcgtgagccaccgcacccagcccatgccctccttttacaaggaagaaaacaggcaggcagagggaagagcaggggcgggggttttgctacctgagctgggaggggcttctttgcaggtgaatcacagttcccagcaacccctgggctggtcagccttcttagcagccagaattaccctgtgtccctttcctggactctgggcttgtgagggcttaaggggtggggccctggctgaaccctgaggctggagaagggttggggcttctgcctgggtcctccccagagtcaggctgaggcattcagagcccgttcctcccatcctctccctctagtctggttccccagtggccaccttcaagcagcacgtggcccccgtgacctccgtcgagtggcacccccaggacagcggggtctttgcagcctcgggtgcagaccaccagatcacacagtgggacctggcagtggagcgggaccctgaggcgggcgacgtggaggccgaccccggactggccgacctcccgcagcagctgctgttcgtgcaccagggcgagaccgagctgaaggagctgcactggcacccgcagtgcccagggctcctggtcagcacggcgctgtcaggcttcaccatcttccgcaccatcagcgtctgaggcgtcccactggctctgatcttgcttcctgcttggaaactgaagtcgaattgggctcccctggaaggggttcattcaggtctgttgactgagactggccggcctgtgggctgccgtgatggattctgtttgacgtattgttctctagaaggcctggctctgatccagtgacccctctcaccaaagaactcggtttaaccagggctctgtaagaccactcccacccagagacttgtgtggcctggtgtggcctgtgtgtcggattccttcctgtcagctgtgacccatttgacctgtgtccccagaacccagttttttgtttgtttgtttgagacggagtcttggtctgtcgcccaggctggagtgcagtagcacgatcttggctcactgcaacctccgcctcctgggttaaagtgattctctcagctc[134 bp omitted]cggcctcccagagtgctgggttgggattacaggcgtgagccaccgcgtccggctcaggacccagttttggctgctggttcccagcaggggactcgggggatatacagtggctgcaccaaattggaggtgtgggttcctccaacacaatttgcttctgcccgttgtcttcctgccagctgggtttggccaggatttctccgtgtgggggctacatgcgaccctctcccctcctccctgactttagaggctggtgctgtgtcgggaggaaggtcagggctcctgagcagcaataaaggaccaggaagaggcctgaggtgtatttgagactctggtcctttggccacagccctatgaggaaacggggtgtggggggagtttgggggtggggaggaatttggcaccagctgcccccaggccgctaggctgggggaggccactgggagtccagtgcaacccaaccttccgcccactgggtgccgccgcgttctgccttctctaagtgtccttccatctggaactcactctggcttagtgaaaggggcctcatccctgacccccaccagcttatgaaggcttcatctcagggaactctggaccccccatttctccctccgtccatctcccctttatcacgtttctttctttcttctctgtgtccccctctttcagagtctcccgtcccccactgccagtctccctgccccctagtcgctgtctcgctcctccgccgctgtctcctgtccagcctgcctgggctgtggcccagccgctctgcctggctggcctccctggctccccctctgcggctctgagctagccccacccccggcccccctccatccagcctctgatccatctgtggactccgaggtcgggtgcccgtcacacggcccctgggaccaaggacagactacagcccctcagcacccacagaggcttcccctcagccctagccgaggagcccccagcggagggcatgggggtgggccgccccaacaggtacgtgcctccatgcaaggcaccgctgagccatcccctcctgctctgctgcgtcgcccccatccacccctgccccagcatccctgtcctcagcttgtccccttcaagaaggccttgtcttcccatcagtgacaggctcagcgccaggagaatccacccccaggttcagtgcctccaactctcaccccatccccattttatgcattttctcactggcttccatcctttcagagaaaccctctcagtctgtctgtctctgtctctgtctctctcccccatctctgtctctcccatctctctctgcctctctctgtcttcacaatttcatctccccatgtcgccatttcttaaaacatttcttttctccttttcgttttcccaattgccctgtccgcctctatcttctctgtccccctccatctaggtctctgtccccccctctctctgggtctctgtccccctctgtctctgagtctctatcctctcaaggtctctgttcccctctctctgggtctctgtcctctctcaaggtctctgtccctttctctctggatcaatgtccctttcctgctgccctctctgggtctctgtccccctctctctcagggtccctgtcctgcttggtccctgtactttttcttggggcaccctctcaacacccctcctcctgcctatctctgcatctctttgtctttctgtagtctctgctttccaacctgctgtccagcccccaccagtaggtggggagtggtggggaacacccctggtttcggaagagtgagagtgttgatttgggagggtgagggtggggcctgggggcggggcttcttggcctcagattagacagtgactttgacacgaagttgaagcaccttaagccctgtatctcctttatatggaaacattaagctgctctcgcaggtcaggtggaggatccctttccctcccgccctgcttttgctaggggaggggggtgccctgagcctgagtcgcagccagcctgggagctgggccatgttggccgcagatggccccctggtgaaggttcccgttggctttgggaagtagacaacgggtctgcctcacggggctgaggtgggactggaggatttcgagggcagaactctgggaaggaaagaaaggcttaggacccaaccagcattccccctggcactgcgggggcctggccagctcatggcgttccctgagcctgttccccaactgtgaaagggggtgatgatcttcacctcccggcatcctgagcggccaaggtgagcagtggggtctgagagtccagtgggggctgtgggcatgtcgggagctcatcacgaggcctcgtacataccaggtgtgtttgaaaccagagtgctcttgagaagactgtggtttgtcactcgggccgtggctcccaggaggcctgggtgggaggctagcttttgccactcctctccccactggctgagagacctgcgacaagggactaacctcagccccagttggcttttctgtgaaaagccaggtcccttcatcaaagggctttggtgagagatgggcaagtgggggtgagaggcccaggctggggcctggggagcacaggtcagtgtcagtgcccacctgcccccccagcccacgggggtggttcctgagggtggagtcagtgctgagtggggatccccaggctggggagggctgcaggtgtagatgctgcatcctgatgttgacctccaggccgcccccttgggcaacgagcctatttcccctttttgggagaacagtctctaacatgcagggttgtcaggggtgagatagagtcaaggttggggtacactgtgggcactggacacagccaggctggtcccctcacctcagccttgcctctgtcaagtgggcctaatgaaccctcgcgaatggccaggctgcctgcgtggttgtgggaagcaggtgcagggctttgggagacccagttggtgccaaacttgacattgtctcatggtcttctttccaaatggagtgtgccaggccctgccaagaagcccctgaggatccccaggttccagcacaaattatttaacccctggaatggtttgtcctgatccagccagttcctgggaagttccccaccacagggccaagcgtttggtaacgttgcagtgaaccctgaaggcaatgaggggtgcgggtccatgcccagccctttcctttggtccaccctgacaggctgctgcgattccctccatttcttttcttcctttattttttatttttaattatttatttattttttagagacagggttttgctgtcttccccaggctggttctcaaacccctggcctcacgcattcctcctgagttggactcccaaagtgctaggattacaggtgtgagccaccgcacctgccctcttttttttttttttttctttaagagatagggtcttgctctgttgcccaggctgcagtgcagtggtagagcatcatagctcactgcagccttgaactctgggctcaagtgatcccccacctcagtctccacagtagctgcatcaccatggctggatactttttgtttttaagatagggtctcgccatgttccctaagctggtttcagactcccgggttccaacagtcctcccaccttggcctcccagagtgctgggattacaggtgtgagccaccatgcccagcccccaggcctcctgcctttcacagatgagagctgaggctcaggaaaggatttgacctgtcatccatcacacacctagtaaatggttgagcaaactgagtctctggaaaaagaagccagagatcccaggggacatggtgggtgagcaactaagccaggactgggccctcatccatatggtaagaaggcccttcctggtcttttaagaagtcccaatttccccaccttacaatggaggaaaccgagactcagaaagagttgccaaagatcagagggtcgggcatgaggcccatttcatttattttacaatagcttcattgaaatctaattcacatatcatatcatacactcactacagggtacaattcaatggcttttagtgtattcacaattgtgcagccatcacaattaattttttttttttaaatggagtcttgctttgtcgcccaagctcgagtgcactcgtgcactctcagctcactgcaacctccacctcccgggttcaagtgattctcccacctcagcctcccgagtagctgggattacaggtgcgcgcctgtaatcaccatacccggctaatttttgttatttttagtggagacggggtttcaccatgttggccaagctggtctcgaactcctgacctcaaatgatctgcctaccttggcctcccaaagtcctgggattacaggtgcgagccaccgcacctggccagcataatgttttcaaggtttatccatgttgttgcatctatcgatacttcatttctctttattgtcaaatactattcattggatgaatataccacattttatttattcattagttggttgatacttgggtttccaccttttggctattatgagtaatgctgctgtgaacatttgtgtaccagtttttgcatctgttttcatttctcttgggtacataagtaggagtgcaattgctgggtgatgtggtaattctatgtttaaccatttaagtaactgccagactgcttcctacagcagctgcaatttttcattccccacagcagtgtatgaggatgccaatttctccacattctcgccaacacttgttttttttattatagccattctaagtgggtgcaaaatggtattcctttgtgcttttgatttgcatttctctgatggctaatgatgttgagcatcttttcatatgtttatgagccatttgtataccttctttggagaaacgtctgtacagatcctttgcctactttttttgtgcctcagcctccagagtagctgggactacagatgtgcaccaccaggcccggctaatttttggatttttaatagagacgggattttgccatgttggccaggctggtctcaaactcctgagctcaagtgatccagcttcctcggcctcgcaaagtgttaggattacaggcgtgagctgctgtgcctggccccctttgcccacttttaaattgggttatttggcactagcccacatcgtgaaaccctgtctctactaaaaatacaaaaattagctgggatggtggcatgagcctgtaattccagatactcaggaggctgaggcaagagaatctcttgtacccaggaggtggaggttgcagtgagctgagattgcgccactgcactccagcctgggccact[224 bp omitted]ggcaggagaatggcgtgaacccaggaggcggagcttgcagtgagccgagatggcgccactgcactccagcctgggcaactaagcaagactccgtctccaaaaaaaaaaaaaaaaaaaaagtttggggggtgttacttatcttttcatgattgagttgcaagggctctttatatagtctagatacaagttcctcatcaggtatatgatttgcaactacagtatcttctcccattagtgggttgtcttttccctttcttaaaaagcttttttgagacatggtcttgctctgtcgcccaggctagagtgcagtggtacagtcgtaactcactgcagcctcaaactcctgggcttaagcaatcctcccacctcaaccttccaagtaactaggactacaggtttgcattaccacatctggctaattttttaatttttttgtagagcaagccccttgctatgttgtccaggctggtcatgaactcctgggctcaaatgatcctcctgcttcagcctcccaaagcgctaggatacaggtgtgtaccacctcgcctggcctctcttcactttcttgatagtgtctttcggagcacaaaagttttttagttctggccgggtgcagtggctcacgcctgtaatcccagtactttaggaggccaaggcaggaggatcacttgaggtcaggagttcaagaccagcctggccaacatggtgaaaccccatctccactaaaaatacaaaagttagccaggcgtggtggcatgtgcctgtaatcctggctgctcgggaggctgaggcaggagaacccaggagacagagattgcagtgagccaagatcgcgctactgcactccagtctaggtgacaaagtgagagtccatctcaaaaaaaaaaaaaaagttatttagttctgatgcaattcaattgatggattttttccttttgttactttgtgagcctgtttttgaaccacagctgacctcagagccctgaggcatctctccatgctgagaagcagttacaccttacgattatgagcatggaccctggagctggatggctagcattcaaatcccagtttacttacctgtggtcttggggaagttttatttatttattttttttgagacagagtttcactcttgttgtccaggctggagtgcaatggcacgatctcggctcaccgcaacctccacctcccaggttcaagcgattctcctgcctcagcctccctagtagctgggattacaggcatgtgccaccatgcccggctaattttgtatttttagtagagatggggt[136 bp omitted]cttcagtttcctcatctagaaaatggggataatgatgtctgcctcataggcttgctctgaggttcaaatatgtaaattcatgtaaagtacttacaacaacctccaaattgtataaacagtataattgatagaacacaaattatgaattcagtacatagatttagcactgtataaatgcatgctgtaattattgtggcacttgctataatatcgttattgttatagtattttccgttgttgttgtacaagtatcttctatagtattgttgctgtttatcttccaacttggaaggtgagtatgggccaggtggggtggctcaggcctgtaatcccagcacttgggaggttgaggagggaagatcgcttgaggccaggagtttgagaccagcctgggcaacatagtgaggcccctgtctctataata[140 bp omitted]ggtgaaaccccatctctacttaaattacaaaaacttagctaggcatggtggcccgtgcctgtaatcccagctacttgggaggctgaggcaggcgaatcacttgaacctgggaggcagaggttgcagtgagctgaggttgcggtgagctgagattgtgccgctgcactccagcctggcgacaaagcacgactccgtctcaaaaaaaaaaagaaaagaaaagaaaaaagttaaaaaaaaaattacccaggagtggtggtgtgcacctgtagtaatcccagctactcaggaggttgagacaggagaatcgcttaaacttgggacgcggagattgcagtaagccaggatcatgccactgcactccagcttgggcgacagagcgagactctgtctccaaaaaaaaaaaaaaaaaaaaaatgcgtatcgttccacctatttgacagatgaggccactaagccccaccagaaagcatgcttggccgatgagctcatccattcctgttgcccctgacgtttctgccggtttcttgtcccagcaggttgggggcgcctgccccccactaggccaagtggagggggtccctccgtccaatgggcctggccagggccctacgccgcctcagcggcgccctggattcgggagacagccgggcgggcgatgaagaggaggccgggcccgggttgtgccgcaacgggtgggcgccggcaccggtgcagtcacccgtgggccggcgccgcggtcgcttcgtcaagaaagacgggcactgcaacgtgcgtttcgtaaacctgggtggccagggcgcgcgctacctgagcgacctgttcaccacatgcgtggacgtgcgctggcgctggatgtgcctgctcttctcctgctccttcctcgcctcctggctgctcttcggcctggccttctggctcattgcctcgctgcacggcgacctggccgccccgccaccgcccgcgccctgcttctcacacgtggccagcttcctggccgccttcctcttcgcgctggagacgcagacgtccatcggctacggcgtgcgcagcgtcaccgaggagtgcccggccgctgtggccgccgtggtgctgcagtgcattgccggctgcgtgctcgacgccttcgtcgtgggtgctgtcatggccaagatggccaaacccaagaagcgcaacgagacgctggtcttcagcgagaacgccgtcgtggcgctgcgcgaccaccgcctctgcctcatgtggcgcgtcggcaacctgcgccgcagccacctggtcgaggcccacgtgcgtgcccagctgctgcaggtgcgcccgggaggagaggcggggacttccgtgagccctgggggattgtgggagatgtaggcccgagggcgaggggcgtgcggtcctggagggggcgtggactacaactcccagcagcctcttgggcctggggcctgcgaatgggtcactgggcagctggggatgtaaacccaacagaaaggtatgtgaccagctcttcctggaggcctggatttggggcatacagagcttcctgtggcttgaggattgcccgcctgtgggtagaccccaaaagggccacgcctggcctgtcaaggctctgggccgtaattcccagaagcctctgggtcaagggacctgtccaaagatggggtggcctcagatgcagctttgcgagggggtggtggagggcctgcgtgaccgttctattactcgggtgtacaattcccactggacactgtggcacagtcggaggcctgtgacttgaggcccccgggagaagcaggccctggaatgggtgcagctcatcgctgtggagcacagttctccaggcctctaggtgtggggtcctgcggcatctgtgggagaattcattccccacctcagtggcccattgtgtcccaccagcctcctaacctctgagagcagggtggaggtggcaacgaaacgaaactgcacctcccattggcccctggggtactggctccctccctgccctgaggaaggggccttagcgttcctagaattgtggtcaaattgctcaaacatctccgttcccaagaaactctgggccggcagctgccgtggcccaagtaaagtgactttaggactctgggctgaggctggacttggagaggatcgggggtggtgggagctgcaactcccagccgcctctggggttcctctacttggggcttccagagacacttacaagaggaggatagatgcccacctcccacttcaatctcctgcctgaagctttgagataccaggattcatgaataggagggacactggctcttgcagaagtcggtggggcagtgacttggcctgggaggtggctatggaaccagcgggtaggcgggggtgaaatacccacacccccacaaagcgtgctcacacacagaatgacatggaagggtttgcagttgccctgacagctaggatagctcaggggagagcccagggataagcctgaggcagtggtgggtgcagaatgttggacctaggttgccctaactcccccttcttgtcatctgatttatctttctctggccacatactaaaagccatttttctctcccgctccttctccaattctctgttgaatgtcatccttattttccgttgtcgctttgatttcatctctgtcttgctgatttctgtgtctctatgccaatatcactctgtccctctctcctcttcccccaccacgcccctcttcccgttttctacccccaaaccctgagtctctttcctctctctttatctctgggtctctgtcccatgtcccatgttttctctggacctccatcctcccctcctgggtctctggctcccttactgggtttctgtgccctcccctgcctctctgacttcctctctctctgggttgccggccccatctcttgatctgtgttctcacccttttcttcactcctgtggtctttgccttctttctctgcatctcttcctctctctcacttcgtctctgcccgtctctgtgctccctgctgtctttggctcctcgcctcctgctgcagccccgtgtgaccccagagggtgagtacatcccgctggaccaccaggatgtggatgtgggctttgatggaggcaccgatcgtatcttcctcgtgtcccccatcaccatcgtccatgagatcgactctgccagtcctctgtatgagctaggacgtgccgagctggccagggctgactttgagctggtggtcattctcgaggggatggttgaggccacagccatgaccacacagtgtcgctcgtcctacctccctggtgaactgctctggggccatcgttttgagccagttctcttccagcgtggctcccagtatgaggtcgactatcgccacttccatcgcacttatgaggtcccagggacaccggtctgcagtgctaaggagctggatgaacgggcagagcaggcttcccacagcctcaagtctagtttccccggctctctgactgcattttgttatgagaatgaacttgctctgagctgctgccaggaggaagatgaggacgatgagactgaggaagggaatggggtggaaacagaagatggggctgctagcccccgagttctcacaccaaccctggcgctgaccctgcctccatgatgcaaactgatgtccccttccccgtgtatgcccccttccccaaggtagcaagatggagggatggggctctctcctgggatgggggcaggtgttcctgaataccgacaggcctgctgggtaaatgactaggtggtaaggttctgccatgcctggtgacccaccatggacatactggaccttaattcctctgcttctgtgctccctcctgagaaccctttatgagcctgattcctcagtctcaccagaattctggatcacccaagaggaaaagactggcagttctagattcctctatatggggagacctggattgttgaccagggtgagaagccaatggtatagactgcctctggggaagcaagttggcagttcttgaacagcatcagatatcaagagtttgtaggtctggattcacctaagattcaagggagtgttgcttctcaactcagccaactgagtagcaaatcatttgttctagaccacctaaggagggaaggttatggaatgccccaagtattcaagatcatcttgattgaccaaagaccaaaaaaaaaaaaaagacctgtggttccagaaagctcattagttgagattctgtgagtctaggttgaccacagaggcaagcactggtgagtctaggacagattttacgtggagagttgaactactccagaaactaaagagtaatgtttctagaatgcacaaaacattgttagtctgtgggtttagaaagactgaagtgacagattaagagttcttgatattagataactccaacttctggctgtagagcacccagccaagagaataagcagtgctttgaaaggatccactgggtgggttgtttttttttaaagtgccattctagaatgtccaaagggaatcaggattctgtggctgtagactgatcacagagtcaaggaagcagtggcaattctagatatctgagattttgctggttccagtttgcccaatggagttgagaatctcaatgattctagatgacttcttgtggttctgtaatgccaaaaggaatgaaggctccagggatacagagttgtccattaccaaagcctggaagttctcatcacctccaggtggactgcttggcagtgctaggaggtggactcaggacttcagaagcaacatttctggcctgacctggaaggtgaaggtgaaggtgagaccctgtagggcacagggctaattagtggacaagggaagggggaggcccagggctggtgagtctagaatgctctggaaccctacacctagtgatgtgtgtctatttctttttctttttcttttttttttttttttgagactgagtctcgctctgccgcccaggctggagtgcaatggcgtgatctcagctcactgcaacctccgcctcccggcttcaagtgtttctcctgcctcagtctcctgagtcgctgggattacaggcatgagccactatgcctggctaatttttgtatttttagtagagacggggtttcgccatgttggcgaggttggtcttgaactcccgacctcagatgatccacctgcctcggtctcccaaagtgctgggattacgggtgtgagccaccatgcccagccgtgtgtctgtttcttaaagatattatacatatgtatattatatatatgtaatataaatacagatatctatctattttttcccttggtccctacaacaggcttagagatggagtgctagctaattggaatgaggtccttttcaaggaccccagaagctttgctctaaatcccaatgctgccccaacttactgtgtcactttggactcctcttcatgtcagtttccccatctgtaaaaacgggatattggaacttgaagttcttcaggggcctttccagcaggatgagtcctcactacaccaagggtgggatgggcattcgagtcctggggatttccctcctctccccagtgctggatcatacggccttccaggagacgctgggatgtaagatactcttggaggctggctctgaactcgggtgtctgaatcacagggcaagggtaggcgtgggctgtggctaacagccagagtcacttccctggcctagcttggggacctggggaggaggaggtagctctggacaccagggttcttcccattgtgggagagtgagtgttttagggggagacctgtcccccagattaaagaactgggagccctagcggatgtgtctgcgaatgtgtttctcgagcatgggtcctccgacctggccccctgcccatgctaccatctacctaagtgccccgcaggctgggagccaactgcagagggagccagtgacagtgaggaggacgtgttcccaccccgtgttctggaccgagggcagccactgtcattgccattcagccttcacaagtgctgcatcaacccaaatgccccctccagcttctccatctccctttatccctcagaatccccatgtaataaccggatgggattaattagctggctgctctctcagctcagggtgtctggggtaggtagggatgggggcaatggaaacgcagggttggggaaggatgttaagttggaagtgaaggggcagggagggggtttcgtttgaaaggagtatgggagcagggcagcccagcctgggtttccactggggagggcagggcctgggccactcataaaggtcagtgaggggattaggagcctccatgtctaatccgacagcttaactaggtcctggccctgaatccgtctccacctgcccagcccagggacagcaaatgaggacgaggcccagacaccacttcagcccccattacggcttccctctttacaggggtgcctgggttccctattccagccagtcccttgaccacattccgttacaaataatgggacatagaggctggggaaggggaaggggaaggggcctcagaggagggaggagtttaagaagggcaagggtggctgggcacggtggctcacgcctatgggcacggtggctcacgcctagcactttgggaggctgaggcgggtggatcacctgaggtcaggagtttgagaccagcctggccaacatggcgaaaccccgtctctactaaaaatacaaaaattagccgggcatggtggtgggcgcctataatcccagctccttgggaggctgaggtaggagtatcgcgtcaaccttgtgggtggaggttg[133 bp omitted]gaggaaaaaaggcctctgagatgggagaaggaatcagagaggtgggaggatgctgaggaaaggggagttgtcttagcaggaggatgcttggggaagggaggagtcttaggaggatgctaagctaaaggaaggagtttggagaaatgagggaggagtctgagcggcagaaggtgccaggaaggccgagcctgtgctttcactaaatttcaccttcccctgttccattccccatgaccgataccaaatagcatagcatttagaaaaaagtaaatcttggccaggcgcggtggctcacgcctgtaaccccagcactttggagggccaaggtgggcggatcatgaggtcaggagttcgagaccagcttggccaacatggtgaaacgcccgtctctattaaaaatacaaaaaatagccaggcatgcaccatcatggtgcaaccctgtaatcccagctactcgggaggctgaggcaggagaattgcttgaacccgggaggcggaggttgcagtgaaccgagatcgcgcaactgcactccagcttgggcgacagagcaagactctgtctcaaaaaaaaaaaaaaaagaaaaaacgaagaagtcttttgtttcaccactccacgactccgaagaggctgagggggatggggagggcatagatggtgataaagaaggagttcggcggtaagaaggggctgagaggaggggaaatacgcggagaagaaatgcaaaagaaaaggaggcctaaagccgctcccggttgcatggcaacctttgcggtcagaagccagcatggcctgctaggaggtgtggcttacggaaacaagccagttctagccccgcctcctagcaacaagactaacaaagtaccgccccctagcaacgtattatcggaggcggggctcggtttacctagactccaagtgtccagggcctttgagcaggcgcagaggtggctgtaccgcgtggctccgcctccgcgcgacacttttccggggcttctcattggagagcaagcctgtcaagtgctttctgttgtttcggaggcggggcctgctgccctgcctgcactccgattggccccgcgggccgtctacctctggccggacatacctacaccggctttttgtacgactgttggccctggagaacgatcctttggtggcgagggcggggaggacgaaagcgcccactgtggattggacagtgtcaaaaagaggggcggtccctactgaaggggcggttgggcgacgaagggaagagtcttttcagcgctgaggactggcgctgaggaggcggcggtggctcccggggcgtttgagcgggctcacccgagcccgcgggccaacgcggatccaggcccgactggcgggaccgccccggattccccgcgggccttcctagccgccatggaggacggcgtctatggtaggtcggggaggggcggggtcggctgggagttgctggagcgttttctcctgaacgttccgccgcgaacgtttccccctggcgcgcggcgcccagaagcgttcggctcagtcgtagacttgtcgcgccgcttttgttgggcgctggacgggcttccggcggggcccgaaagccgggcgttccaggccattgtttgggctgagcctgtttccggtggcggcgggaggggcgggatggagtggtggaggcgaggccggggcggaaccattcccgctggaggggcgggcgagcccagcgcctgccggggccggggaggggcgcttgggttgcggggaggggagaaatcttggggggcgggggccttcgatgtcccgccccaccttcccaactctcctgagctgtcatcagttcccccggctgtagtgacttttcatggacccagtagtccggataaccaggtccccagctacctcgccagtaatggagtcagaaaaccaaggcctcagtccccttccaagtaatggacctagaagccgaggcccccagccctttcttccctcagatctaagagctcaggcacccattccccttctccctcagactcaggaatccgggccccaattccccttgtcccccaggactcaagagtttagagccccagctctttctcctctgcagggaggaatccaggcccccagcccattcttctgtgcagacataggaagccccttacacatcctctcccagctctgtccgcccccagattgcaggaattcaggctcacggcccctagcactgacttttaaaccttgaccccgatccctagaacccccagacctgactccggaggagcggatggagctggagaacatccggcggcggaagcaggagctgctggtggagattcagcgcctgcgggaggagctcagtgaagccatgagcgaggtggaggggctggaggccaatgagggcaggtgagggctggggcggatgacctagggggcgtggggttggctgaggccagggatgcccaggcattgaccctccacccccaaccctgctctctgctcctgcagtaagaccttgcaacggaaccggaagatggcaatgggcaggaagaagttcaacatggaccccaagaaggtgcttggggccacaggactgggatcagctgggcaaacatccaggcaggggcttctggcacctccgggttccagaagcgtgatggtgccgggtctattctaggtggacagacttggtcctaatccctggattcagatactggctgtccatttgttttctgaacactgaacactgaccaagtgttccagccctcctgactgttttgtcccctgcctggaaggtcgtcttccactttctacttgtatgggcgcatttctggtcccaagatgagctcgagtcttgtaggggctgtggacaaagtgacatgcacaaaggagagttgacctctctcccacaaaggtgccgtgacggaggaaggtatcagggtagtggacctctggaggaggcaggctggtggagtcagggagggcttccttgaggaggagacattcaggtcgggtttgaaggatgagtaggtgttcaccaggtggaggaaaggcttttgttcacctactctttgtgtgtgtgtgtgagacagagtcttgctctatcacccaggctggagtgcagcgatgtgatctcggctcactaacctccgcctcctgcgattctcctgcctcagcctcccaagtagctgggcttacaggctcccaccaccatgcccagctaatttttgtatttttagtacagatggggtttcaccatgttggccaggctgcttccaaactcctgacgtcaggtgatccgcccgcctcagcctcccaaagtgttgggattacaggcatgagccaccgtgcctggcctgttcacatactcatttaacacccattttctgaggcctctcaagagtctgatcctgtgtagggcaatgctggggacccaaagaagaattagatgctgccttgtgctcagagagcccttggacaccgataccacagttcacagtgagataaagcagtagtagagaggtcttcgtagcacagagagtgagagaaacctccagtctagccagggcttcgagttcacagcccttgaaggactgcgtctgctaacaggttgtcacgttattctttcctgaagcaattggaattctgttcagtcattcaacaaacattgattggctgggttcggtggcttatgcctgtaatcccagtgctttgagaggccgaggagggaggattgcttgaagccaggaatttgagaccagcctgggcagcatagtgataactcatctctagaaaaaatataaataaataaattagccaggtgtgttggggcatgcctatagtcccagcttctgaggaggccgaagtgagaggatcccttgagcccagcagttcgaagctgcaatgagctgtgatcacgccactgcactccagtctgcaatagagcgagaccaggtctcagaaaaaagagaaaatgtactgagcacctgtgccttgccagaccctgttgttggtgctggaattaaccaggcaaaggcagagagggtaggccatgaagtgcaaaggccatgagttgggaagaatgctatttaagacctgtgagaaggctgaaaatgaaacctggccctggtctgttgagggtgggggtaggtctggatgctgaggttcccagggaggtgagtggggtggctttctggccctcagcactgagaccttgtccccacccaccaggggatccagttcttggtggagaatgaactgctgcagaacacacccgaggagatcgcccgcttcctgtacaagggcgaggggctgaacaagacagccatcggggactacctgggggagaggtacggtcaccactcagctcctgtggggcccctccctcccaccccccagacccagctcctgccctcacactggcagctcacaggtggaacagccctgcagcctccccgcagaggggccctggcagatcagccttctgactggactgtgacagaatggactgacatgggctaggggagcctgcggccaaccgagagcatctggggatgtggggccttctggaattacctggcagttgtggggaagcatccatttatgtctgagaagggtagagaacatctctcaaggatcatgggagcttgagaaccgtgggtagaccatggctgtgcataggcactgggtggccatctgggagctgtggggaccgctgggcccttgtgggagcttaggagttgtgggggtcatttggaagcctagggtgcacaggactggacatcagatgattggaggccatctgtggacgtctgggaatcagggatttatagagatctggggtgcttgggaagcatctctggatgtctgggggatgtgggggctgtgtctggatacctggggagcatggggatcatttgagagaggtgacagtaggtagcatacatgtttgcggcatttctcccaactgtacaaaggtctggcctaagcagggttcccaagccagatattcctcccaagagtgtgttctgagcatcccccaccctgggggcaggcctgtgtgggagtccagcaggaaacttcaccctcggcagtgggcagctgtggtgcagtagagggggcacgacttccccagggcattgccctttgcccattcctgccccatcctttccaaactgtatgtgtctttgtcccatccttccagggaagaactgaacctggcagtgctccatgcttttgtggatctgcatgagttcaccgacctcaatctggtgcaggccctcaggtgagtgagggggaggggtttggaacgccaggaatgtacctgtcagggccttcctagttacaagtgacaaaccttactcaagaaaaaaacagaaacaagcaaaacagaaacaaaaactagggaactgagtgtgtcctgcaccataaaagttcagggttatggcctccttcaggtatggctatatccaggagctcaaatggtggtcagaaagtcgactttctttgcctcttgtatttgccactgtgtcagcattgctctctgcagacccgcttacctgataacaagcctcaaccaacccccagacctgtctagcgaacttagcagaaagaggctatttctgtagggattcacaacactcccgtggccaatgcccattggtgagactggatcatgtgaccatacctgaaacaactgctgaggccggaaggtcgggattcctcgtggaccagttcctaacacagggactgagagtggggacaggctcccaccagccctggcatccattcctggcccctccccaacccaggcagtttctatggagctttcgcctacccggagaggcccagaaaattgaccggatgatggaggccttcgcccagcgatactgcctgtgcaaccctggggttttccagtccacaggtgcgggccccaaatcctgggtcctgggaaagaggagactggggcccagactcctaggtctgagggagggagggggctgggagctgggaatcctgggtcctggggaatgggggcactggggactgacatgcctgggtcgtcaccacctgccctgtccggtgcagacacgtgctatgtgctgtccttcgccgtcatcatgctcaacaccagtctccacaatcccaatgtccgggacaagccgggcctggagcgctttgtggccatgaaccggggcatcaacgagggcggggacctgcctgaggagctgctcagggtcagtcccccttccctgcccctcagccctgcccctcttcctgccacagacacccccgccccacctgtggtctcctagtgcccaagctgtctgccctcacccccaagatggtgcgatcatgccaactcgtgtgtgatctttttctctctctctgggtgcttctcttcttgactgtctctctcaggctttggccctgacaattttggcctgtctgtcttctctgtctctggctgttgggctttccggccctcgattggcctcattccccatctgtctgtttctctgaggacgtagccggctcctccacctatcaccagggcatctcttctttcctccgccacctcagcctccctccacttctctgcctttcacttccctctcctccccactacccctctctcttccccactatgagtcatcccatccctggtctcgctgccccccaccctgagtaaccctggggggccccagggggctcgaatggctaatgcagcctttactcctcagaacctgtacgacagcatccgaaatgagcccttcaagattcctgaggatgacgggaatgacctgacccacaccttcttcaacccggaccgggagggctggctcctgaagctgggtacgtgccctcccgaccccgctggtccctccgcaggaggacatttgtgggcctgggccctggactcagcttccgcacacacctgctgcctgaactgaggcaaatgattcgacctctctgaacctcagttttccacacccaaaaaatggggctgaaaataaaatcaggcctgtgtgctgggcctggcctgtagtaagtacttcccaaccccttctcttgacccacaaatgttgatggagcccttctgtgccaggccctgagctgggctgaggaggcagtgagaggcagctgacattgtcctttcgtgggagaagagttcactcaggcttctttccactgcgttaacccagcccgagggagccaaacccctggaatctattccccttggcaagaactcccagggttccaggcaggactgaccccgcactccgaggcatcaggcccagagcacttggctgatccaggtgccatccttcccgaaacaccacccacaggcagaaaagagccaaacaggccaggaaacctgtcccagattctggcttccagctgtggagggaatagccagggctggtgcagatgagtcgggaaacccagcagagatggaggggggagtcttcgtcataacacgtggcactggcacattcaaggtcggttagcatggatcagacaggatcgtagcatgatgaggggttagcacaaggactagagtggttctcagccctggctgtacatgagatttgcctgggcaactcgaaaactccggtggctgggccatagactcctgaagtcaggctctcaggagcagaagggccatcagtcatcgtttaagctcctcgggtgctcccaatgcatagtcaaggttgagagctactggcctggagccgtgcctggtaacagtaggtgccacctgcgtgttagatgtggtttataatggagacacggtgcacagctgctccagagagacacatctgggcagttacagtccagcacagcagtggaggcttcccgcggcagcaggagagcccacaggaagctttcagctcagtgaagggagtcaaggtcaggcttcttggaaggaggttggacagggcagctttggcctctgagtcttgggggcctccccatgtggaactgtgctcttaaaccagggcatcaccacctcaacagatgccagggtttcctggtaaatgtaaaatacacaagtcaggcagggcacaggggcccacccctgtaatttcagcactttgggaggacaaggcaggaggattgttagaggtcaggagtttgagaccaacctgggcaatataatgataccccccatctctacaaaaaataaaaaaattagccaggcatggtgatgtgggaggattgtttgagctcaagtggtcgaggcttcagtgagtcatggttgcgccactgcagtccagcctgggcaacagagcgagaccccgtctctataaaataaaacatgcaaatcactgtccagccaacaccccagtccagatccctgcattcgatccaagggaggcagactgctgggggaaattgagagtcctcgaggtgcccctggcagtgagcgggccagaaagagaagcaggaaggcgccagcatcacgaggaactgcttccctcaaaactgctgtcaggccaggcacggtggctcaggcctgtaatcccagcactttgggaggctg[134 bp omitted]gaggcacaagaattgcttgaacccaggaggtggagcttgcagtgagccgagatcacaccattgcaaatccagcctggacgacagagcgagacagtctcaaaaaaacaaaacaaaacaaaaactgctcctgtgagcagtaactttcccatttcccagaggctcacgcctcagtttggttctgagccccacctaaggctgcccagccccagggacatctctgaccaaagggcctctgttccctttgtgccagttagagggaccccttccttaaaagatggaaatacaggagtggagattggtgatggtggttgctactccatgcctaataaaagccattcttactgtcattgtttaaccctgggcccacaaggaagccagcagcaggtcattttgccacaggaaggtgtaggcccgagtgagtctccaggctggagtccagagagtccaagagagtgccctgaggtcacacagccagtttgtgcaggagctgagatgggccctcacacccacctcagaccaagggctgggggttttgccttctgtcctgtgggggcctcctccagggcagaggcacttttaccatgtcaagggaggatgctcctggcctaggacagaccctagggggtaggctggggccctgtaccgaagcaaggggttttcaaggctgccacccggggctcatggcccttggcctctctgggagggaggagccccggccatccccaccctcgtggatgtaactggttttcttccctctctctccctcccctcctctctgcgtctttccctctctcctgtgtttgcctctctgtcctgcccctgcgcacccctccctgtgcccaccctgtttctgtcgcctgcggctcttgggggtgctccattctcccgccttcccttctcctgcacctggtcctgcctgctttctcgctgtctgccccaggaggtaggtacacgacctgtctttgtctcccatcactagacgaggggagggggctgccctggcgccctggcgccctggcctcctgcccacaggaggagggggctgggggctcaggctcctgggctgggactgacagactcagaaaatgtggagccccaagctgggggtggacgattcctggagccccaacatgcctggccctgcttgtctgtctcccccaacgcagcggctttgtctaggccccaggagccccacctctaccgctcttgctctgcttctcacgcccctcccatctcccagaggccctgtccccctgttgagcccaggccccctcccaccccttccctttcagggggccgggtgaagacgtggaagcggcgctggtttatcctcacagacaactgcctctactactttgagtacaccacggtgagcgtgacccgacccgggctctggggtcctgggcggagtggctgggagcctggactcctggggctgagggaggtggggtggggtgaggacttggaagtctgagttctgtccaccttgcttcttcaggacaaggagccccgaggaatcatccccctggagaatctgagcatccgagaggtggacgacccccggaaaccggtaagaccctctctgtacaccttcctgccagggcggggcctcctctgcccagggctggttcttacctgcgcccttcctctctcgtccccagaactgctttgaactttacatccccaacaacaaggggcagctcatcaaagcctgcaaaactgaggcggacggccgagtggtggagggaaaccacatggtgtaccggatctcggcccccacgcaggaggagaaggacgagtggatcaagtccatccagtgagcctggactcctgggcctgatggaggaggggctggggcctggactcctgggtctgatggaggaggggcaggggcctggatgcctgggtctgatggaggaggggctggggcctggacgcctgggtctgacggaggaggggctggggcctggactcctgggtctgacggaggaggggcaggggcctggacacctgggtctgacggaggaggggccgggggcctggacccctgggtctgacggaggaggggccgggggcctggactcctgggtctgacggaggaggggccgggggcctggactcctgggtgtgagggaggaggggccgggggcctggactcctgggtctgagggaggaggggccgggggcctggactgctgggtctgagggaggaggggccgggggcctggactcctgggtctgagggaggaggggccgggggtctgagactcctcctgggtatgagggaggaggggctggaggcctggactccttggccctcatcctgggacccctccccttctgcagggcggctgtgagtgtggaccccttctatgagatgctggcagcgagaaagaagcggatttcagtcaagaagaagcaggagcagccctgaccccctgcccccaactccattatttattacggagctgccccgcctgggtggccggacccctgggccttggggctgtggatcctggttccctgtttggaaaattcaccacctctagctcctcactgttctttgtaattaacacgctgttggtaatcttattaattatttaaccacttggcctgctgaccccctcatttcttggggttgacagagtcgaggtgctccgtggagccagcctgtttccctggacaggggcctggacccgcctgtctctgggtgctgcctgggctgtcccggtgggtctgttctggtttcaccccgagcccagcaggagtggagtaaagggagaaggttaatatggtgggagtctggagttggaattggccggggacagagtttagaatgcagggattcagggtcaaggtctagcattcattctagaagttacttgacagccatcagccagttacgctacagccatcagctagttcccatcgttgctttcatggggcttgaggtctttgaggggcaggagatgaagctggtgaggttgtgagctgggccagggctttgaggacaacctggagctggaagaacatgcgaccacctcagggagggtcagggaaggatgagtggggaggtggcccatgtcctgcaagggccttgctgatgggatgtcctgaagggctgggcagccttagatcgggctaagagggcaggactgtgggccagtgccagagccaggcttgtctgttctcaaaggatcagcctcctttggaggacattttgtgtcaaggatagggctgaggacctgcgttctgaacgtctttcctgggattcttgacagccaaagaaattcgaggatcgcctctatgaaggtgaagtcttggcatgtggggtacccctgaatcctgggctaaggtctgtgaccttttgccctccagttggggtatgtgtggtgtccccaaagaacaagggctcgtggatcccgagcagggtgcgatggcggattgggaggtcccatgtcactctcccatgcccgcctttgaagctgaggcgctctttagttaacaaactacaagtcccagcagggaccgggacgcgggtgggagaggcgcctgtggccccgaggcgtgccgcgagttgtagtccctcctgcccgctgtgttcgcttttgagctctccgatgggatgcggcgcttcggaatttcgggctttgatccctgtcccgcccttggccacaggcacctgccggcctgaaggcccccgcggtgggggtaccctgcgcccctccgcgggaaggtggactacagttatcggcaggctgtgcggcgccaaagccacggtgacccagacccgaggtttttccgggcgtcgcagtttcccgagactccgtggcggcgtttgtcttctttttcttagtcagatcccgtacttttgtggagggtagaggaggctttgaccgccgcggccccgggggctggtgggaaatggagttccaaatgagaaaatagaattccccacttctctttcccacaggtgccagggaaacggagtcatcgacccaagaaggtcgtgggagatgaggtcccagggtaaacagcgggtcccgccactatgtcaccctttcctgccgcctccccggatgaactgcatgcagggcggccggctccgtggcaggcagaggcaggaagaggcgcggagcccgctggtggcgaagaggggagtgcggcgggaggggagggcagaggcaggcggccggtcgcgtggggcctgggccgccccaggagggcctctggctggattcttagcagatggaagccgtgcaagggcaggaggcaggggcctgacgtgtttggattgaggttgcaggaggggcccctggctgcttcagggagaataatttggaggcgagcggggaggtgagaggaagctgtgcggtgcaggatggcgtggctgtggaggtggagaacgttgggccacgctaggagtcttgaaagaggagccaaaaggacttgctgagagccgccgcagctggtgaatgacggtgccatgactgaggtggtcgaaagggagtatttaaggggaaatcaggcattccgttttgaccaaattaagctggagatgcctgtggaacattccagccaggctgcatcacgtcacactgaccttcagcattgcccacagtccatcttcccccaggacctgaggattttgcgtccggctccctcctcgcccaggacccccaagctcccagcacgcttctgattttttttgtaggtttttttttttgttttttgttttgttttgttttgtttttgagagggagtctcactttgtgccctagactggagtgcaatggcgccatctcggcttactgcaacctccacctcccaggtgcaagcgattcccctgcctc[134 bp omitted]cagcctcccaaagtgctgggattacaggtgtgagccaccgcgccaggcctcagcccacttcttttgggtggcaatggtttggatatcgtttgtcctcactaaaattcatgttgagattcgagccccagtgtggcaggtgttgggatgtggggcctcataaggagctgtgtggtcttggaggtggagtcctcatggatagattaatgcctgccttaaggggtgagtgagtgctcacccttgggaatttgggaatttggttttctctcccttgcttccttcagcaccatgtgatctctgtgcacacagctgcatccttctgccctcccccagaagcagcagcagcctcagggatgagggaggtcctcagtgagtgcacctgcccagtcttgaaccttccagccatcagaatctgagccaaatcaacctcttcctttataaagacccagcctcaggtcttctgtcagagcaacacaaaatggactcagcacggatcaaattgtgtctcccccacccccacaaaaaactttatattaaaatcctaacccccagcatctcagaatgtgatctgattaggaaataaggtcattgcagatataattagttcagatgaggtcattcatgtgggccctaatccaataggatgtgtgtcttataaaagtttgtacagagacccagacacacagaaatgacaccatgtggaggtgaaggcagagattggggtgacgcctctacaaaccgaggaaaaccaaagctgccggcacaccctcagaagccagagaccggggactcatcctccctcacagcctcaggagcagccagggctgacaccctcatctcagacttctgacctccagcactgggagaccttcagtttttgtgatttaagccactaattttgaggtactttgttatgtcagccctagataactaaccactcctccctcagacccaggagtccaggcccagccccttcttccctcagacccaggagttggggaccccggcccctcctccctcagacccagaagtccaggccccagcccttcctccctcagacccaggagtccaggcccccatcccctcctccctcagacccaggagtccaggcccccatctcctcctccctgagacccaggagtccagacccccatcccctcctccctcagacccaggagtccaggcccccatcccctcctccctcagacccaggagtccaggcccccatctcctcctccttgagacccaggagtccagacccccatcccctcctccctcagacccgggagtccaggcccccatcccctcctccctcagacccgggagtccaggcccccatcccctcctccctcagacccgggagtccaggcccccagcccctcctccctcagacccgggagtccaggcccccagcccctcctccctcagacccgggagtccaggcccccagcccctcctccctcagacccgggagtccaggcccccagcccctcctccctcagacccgggagtccaggcccccagcccctcctccctcagacccgggagtccaggcttcagcccctcctccctcacacccgggagtccaggcccccagcccctcctccctgagacccaggagtccaggcccccagcccctcctccctcagacccaggagtctaggccctggtctttcctccctaaggcccaggagtccaggcccccagcccctcctccctcagatccaggagttcaggcccagccccctcctccctcagacccagaagtcctgcccccagtcaccagcccttcctccctcagacccagaaagtccagctctcaccttccccccgctgccttggttcatgcagcacccacccaccctgtggcaggtgtctcaggatcacttcaagcaccaccaagtctcccagcaggacttattgggaagaagctaaaaccttatcctctctctccctttccccaatcccccaggactcacatgtgaccctaatgccgccatcaccttaactccgaggccagagtctacactacagcctccctaacagagggaaggggctgggttcccaccccttgctccttccctctccccgcatccagactacatcccgcaaatacaccagtgaacctggtaccaaggtgatgggggacaggtcaaggccaagagatcagagccacaaagacaaacccggtcagagggaaaaagacagagtcaaaacagaatccgggagaaaccgagaacaagaaatagagacagcctggcgtggtggctcacgcctgtaatcccaacactttgggaggccaaggcaggcagatcacttgaggtcatgagttcgagatcagcctggccaacatggtgtaaccccgtctctactaaaaatataaaaattacctgggcctggaggcaggcacctgtcattccagctacttgggaggctgaggcaggagaatcacttgaacccaggaggactgcagtgagccaagatcgccccactgcactccagcctgggtaacagactgagactccgtctcataaaaaaaaggaaatagagacaaaagcacaaggcagaaggacataatcgagacaggaggaggtgacagggagacacagacaaggagaaaaatgtggaggcagggaggaactcgagacaaaaacatcgaaatagaattagacagggaggaggaggccaagagcaagagactcagatggggagacaggaaaactccagatcagttggagaccaaaactggggcagggtgagacagggagccagaatgttggaaatgagagagagccacacagataggtgcggttagggtaaagacaagggatgagaatgtcagcgaggtgggcggtcgcatggaaaaacaggtaaactgaggcagcaccacgctgggtggggaggtagaccctgaacttcaaggaacaggcagtgccgacctgaggtgggtgggatgtgatcgtgatccagtgtgggcatgagcagctcatttctgagcccctgccccactagcccctggccctgggatagcgtctggccaccaccgcgggccaccttgcagaaacgtggctctgaccgcagcctgcaccttcccacccaaccccagtgggctccttatggttttttgtttgtttgttttttgttttttttttttgagatggagtctcactctgtcgcccaggctggaatgcagtggcacgatcttggctcactgcaacctccgtctcctgggttcgagcgattctcttgcttcatccttatggcctcttgagccagcagtgctgctgctgcagcggccaaggttgggcgatgcaaaccccaggcgcagagccgggatctggagaagcagagaagccgggcctccgccactgtgcgggagtttccgcttctctgagcatccgatgtcccatctgccatgcgggccaggctgtgaggatgggacttctcagggtcgcactcgctccctgcatcctcccctcctcacctcgcgaaatacgcacaggccccgtgttcctccaaaaagttgtttttgtcttttttaaataatgtgaaaatgccacgcgaaggtttgaaccagaggcccctccaggggccgggctggggagggaaaggggagacgcgaaatggggggtccgggtccccgaagcctgcggcccctgtcttgggccaggagtgggtgaggagggacctccgctgtgtcgaggggctccaggcccaaaagagttcagttcagttccgagaaaggcggctctctatggaggggcggggggattcctgcctcatttggctccgagggggtcaggggggtcaggggagccatctggggggctggggggcgggggcccggggcctcccgtttggcacatggtaggggagtgggagggggagggcccagcctcgggggcctccccagaggcggcgtctgcggtggtggcagtggcgccgtcatccacagaggattccattctcaacccctcttctgagggtgcagcggggtcgggtcttcggggaatcaattctccacggggcctgaggatggacagaggagacagagaaatgaaattactagggggacagcctcatggcttctaggtcactcagcggaaaagcaaagccctcacccaccatggcccaaaagatctgctctgttccctctctgtcctcacctacccctcttctcccctctgctccagccactgggcctcctgctgttcctccagtgctcccagcacggtccgacccctgggtctttgcacatgctgttcccgctgcc[367 bp omitted]cgtcccctccacagagtccttccccaaccatactgaatcaagcagtcacccctgcacgctcatctttctcactcatttccctctgactggtttgcatttgtcactctgggatgaccctgtccttggttttgttgttgttgttgctgctttgttttgagatggagtcttgctctgttgcccagactggagtgcagtggcatgatctcagctcactgcaaactctgcctcctgggttcacgccattctcctgcctcagcttcccgagtagctgggactacaggtgcccacgactacgcccggctaattttttgtagttttagtagagacgggtttttactgtgttagccaggatggtctcaatctcccaacctcgtgatccacccacctcagcctcccaaagtgctaggattacaggcgtgagccactgagcccggccgaacctgtccttgtttgttttttgggggggttttgcttgtttgttttgagatggagtctcactctgttgcccaggctggcatgcagtggcgcaatcttgacttgctgaaaccttcgcctcctggattcaagcaattctcctgcttcagcttcctgagtagctgggattgcaggtgcctgccaccacacccggctatttttttttttttttttttttaagacagagtcttattctgtcgcccaggctggagtacagtggcacgatcttggctcaatgcaacctccacctcccaggttcaagcaattctcctgcctcagcctcccaagtagctgagattacagaggtgtgccaccacacccagctaatttttgtatttttaggagagatggggtttcaccatattggccaagctggtctcgaactcctgaccttgtgatccacctgcctcggcctcccaaagtactgggattacaagtgtgagccacgcgcccagcccacctggctaatttttgtatttttcatacagacggggtttcaccatgttggccggctggtctcgaactcctgacctcaaatgatctgcccgccttggtctcacaaagtgctggaattacaggtgtgagccaccatgcctggcctaccctgtccttgtggaaaagcttcctgtctgcttgttcctataaaatgtaagctcaatgatgacaggagctgcggtcactgctgtgtccccagcatcccgtctggcacaaagcacaccttttccctgtggaaagagctctccccaggaactccgaccaaactttcctatgactctagctctgacttccctgggcgagcagaatgaaagccccatccattgtacagaccagaaagctaaggtccaggaggtgcaggttctcgttgggggcctcatatcaggctccctcatgctccaccctgtactttgtacctgggaggcctgggtcaagtcactgccctcactcccagtccctgagcttgagtttcgctcttttaatgggaagcatgaccttcatgcttcatggagactttggggtatgtggcatctcttggtacccagtaaatgtttgctaagtggacagagccacattgagcagggcagaggagaggacccgcctcaggcccccacaccatggtcttgggagccagacaggctcagcagctcgcagcccacgctgccgcaggaatatttgtcaactgagcgaaaggatttggggtttggcacaattgcaccctccgtctcctctcctggtgattaaaggtgaagccattctcgcttgccagccctgccagctcagccctgactcaccacttggcagtgtccccataccctggaatgcacccccaccctgtcctcacagaggccctgcgatgatggcctaagggagaaagtgacattcagagtgaagcctgaggatgcagccaagtgaaggaagagtcagcccccagacctgtcccacctgcccttgactctctgccctgtccaacctctccattcccacagccctggctcactatcctctcctcagcctttccccagcctcccagctcccactcttgcccttctgcccccaagagaccccagagcagtcttcctacacccaacattgacttccctcccttgcttatagtcgtccgtggctccctggcacccccaggacaaagtcccagctcctcagtgcaccccctgccatctctcctcagccctccatgcactctaagtaaccctgaagccacaccagtgtccttctgttccttgagcgggccaagctctctcctgcctcaggccctgtgtgcaagctgtcccctctgccagcacgccatccccttccccttcacctagttaatgacaaccaacccttccagttcccagttaaattacacttttttttttttttttttgagatggagttttgctcttgttgcccaggctggagtgcaatggcttgatctcggctcaccgcaacctccacctcccaggtttaagcgattctcctgcctcaccctcccaagtagctgggattacaggcatgcgccaccatacccaactaattttgtacttttagtagagacagggtttctccatgttggtcaggctggtcttgaactcctgacctcaggtgatctgcctgccttggcctcccaaagtgctgggcttacaggcgtaagccactgtgcctggccttaaatgacacttctaaggggaaaacaaagccctttcctcttgtcatctgctttctctgcaagcctgagtttgcagttcttcatttgtcatagcagtgtgtggtcagtgtctgcggggagggccaggcaggctcacccgtcttgctccacattgaatcccctgtgcccagcatggcgcctgcacgcagaagatgatcagaaaacattgacttaattaagtgcagtaatagctaataataataataatagctaatggggccgggcatggtggctcatgcctgtaatcccagctgggaggcca[133 bp omitted]tgaggcaggagaatcgcttgaacccgggaggtggaggttgcaatgagccgagatcacaccattgcacttcggcttgggcgacgagcaaaactccgtctcaaaaatactaactaactaaataataataatagctaatggttagagactgctgctgcacaggcgctgtgctgcatactcgggaggattaagccatttaattccctcagcaatctcatgagttagatcctgttatcattcccactctacagatgagggaactgaagcacagagagggaaagcgacttgccccaggtcacacagctaagaaatggcagggacaatatctggactcaggcaagattggggaagtaggagtgaaaccctccagtggcgtcttctaccttagctctgataccggggagcaccacctgtcctgccgagctgggcacaagccctgggtcctgggggtgttccctggctcggcagcagagggcagcagagagcccagtcccgttccagtcctgcgctgggacctgcccgtgtgccctgctctcccagagtggccttagcatcgctaaaagttggaaactaggggcggcatgacccctctcccaaggtggccacgaggattagcgatatggcgcatgtgaaacgccaggaaagaaacctgaccaatgttcactactggagagggcacagactcagaggccgcgcaactgtgggtttgaatcccagctcctcacttctct[143 bp omitted]tgaaaccctgtctgtagtaaaaatacaaaaaaagtagctgggcgtggtggtgcactcctgtgaacccagctacttgggcggctgagacacgagaatcgtttgaacccaggaggcagaggttgcactgagcgtagattccaccactccctccagcctgggcgacagagcgagactccgtctcaaaaaaaaaaaaaaaaaaaaaaaaatgaggacgaggctagaatccaccccatgggatcgcaatgaacattaaatgggttaaactgtggtgaggcactgcagggtccacgcgagagcagcggtgccgctgtgactgctctctaacccccagctgtgtcctccctgctctggttcacaccaaccggctttgagcactctgggtttctctctccttgtctgcccctgagcaccgtgttccccaaacggaggtgggatcaggatccggcaagtgccaggccggagtctgagcccagagatgggacaaagatgggcaagagtcgggggtgggggtaatccccacagaaggtaaaactgaggctcgggggttggggacggccggcctgcctgcctacgaccgtctgatggacgtcgcctggtctgagctggttccagagctgggtggggtgtctgttgactgagaggggagagagaagagactgggaagagagaggcagggacattgaaagatggtcacaagaagttggcagtggaacatagggggacagagatgggcagaggagggggcagggccgaggatatggtacctgcgggccgggcgtcgggggcccgggcgggtggccccggggtctccagcgcaggcgagacggagaagcgggagaagcacagcggggggcctggaggggggaggagggggaaatcctccgcccactcgaaactgcctcctgcggcagaaggaaagaccgcggtcaggctgcagacacctgcggcactcccgccctctggtcccgcccctcccgaccaagcccctcccaccccatagaccccgccccgtccgccccatggctcccgccccctcccgccccatagggcccgtcctcaccaaagccgctgtcgttgctgggaaacccatctccgggggtggcggggtggggaggtgtcgggggcgctggaggcgttgacgggtccgtgtccccctcggggggggcctggacgctcagctcgttggttggcgtctcctgtgaaggcagattagggggaagccagaggggacaaaccttcacgtcccatttaccgcatcccccaaaagcaacaaaaccggctaatatttctggggctctaggaatcccaatttgtaatcactgactcgcacgctctggagaggtggctggagcccctaatctggcttcgaagccttgggccagccttaacctcaacctggccagaggctcctttcctgacagcggagccccgcgcacagctaagtagcccaacgcagggattctctcctggctcattaacgtgaggcctccaccggatcccctaacccaaagcgatctccataagccccaccccgtccacgtcagtcccacccacctctgagatcttgacctgctccagtggccctcccaacccctgccccatcctgagcgcatgccgtgctggatgctgtgaccctgcccctgagccctccctcagaagtagacctgctcccgccctccaagtcccacccctctgaaaacatttcagtggcccaggccccagttcttggccttgtttccattcctttcataatctcagcccagtatgcccgccccaggttcatctagacaaggtcccagttcctcagcaccactcgccctccctttttctcttcaacaccatatcctgtgtttttctttttgttttagacagagtctcactgtcgcccaggctggagagcagtgttgtgatcatggctcaatgcagcctcaacctcctgggctcaagcgatcctcccacctgagcctcctaagtagctgggactacagatgcgcaccaccacaccaagataatttttttctttttaagagacgaggt[146 bp omitted]ccgtcccagtcgttaggttcgctcatccctgacctcaccccagaatacgttaagactgcctgctccatctctgaagcccacctgcagcctagccatggcccttccctagtgggtaagatctgctccaacccgaaccagcctacagacactagaactctagtcaacaaaccatgcccaaactctcactaggccccttcaccatccaggcctcttctcaacacttcctccctagcctctccaggatcccatacttgactacccagtaccccctctttccttccagacccacactctctctccagacctctcctcgccctctagaccacgcccccgtcacaagccctgccctcaccctaggtcccgccccagctctaggctcggcccatactcctggccctgccccattgccaggccctgccctcacactcaaagcctcctcccatcttcctagtcccgccccatttccctgaccagtctctccccagaccccgccttcacccctcaggcccttcccgcgccctgctccatccgccccgccctaggctccgcccccattccagccttggattttctccaggcctcctcttgccgcgccacagacttggcctccctcaggcccggatccagactctgtcccgatcctaggcgcggtctccttccaggccccgcccccgctctaggctcagcctgccttcaaaccctgctgtagaccccgccccaccctaagctcagccttcgtctaggccccgccccaggccctgcacctctaggctcgacctccctccaggccccgccctgggctccgccccccagcccgccctctccctgggccccgccccactctagctcggccccgccccaggccccgccccactctagattggggctccccttaggtcccaccccaattcagcttgccctccctccaggccccgcatcactccagctcggcctcccttcaggccacgccccactctaactcggcctccctccaggccccgccccaccctagctcggcctcccttcaggccccgccccactccagctccgcctccctccaggccccgcccaactctaagctcggcctcccgccaggcccttcccggctctaggctcctgctccctccaggccgcgaccccgaaaccgcgccctctcgggttccgcacctggtcgaagaggtagacggtcacgtccccgtggaaggagaccatcttgcgcttcctctccagctcgctgtcctctggctcgtcggccccgcgcggagacttgagcagcccccgcagcgggcgggccgcgtccgcgtcggcgctgctcaccacgacgggcaccggggctgctcgcgccctcccggggccccgcggccccgccgccgcgcccggcgccgccgcctcctcgtcctcctcctcgtcctcgtcctcgtcctccccgtcctcctccgccggccccggcgctcccgccccgccggcctccccgccagccgccccggcgtccgcgccctcccacgggggccgccgcgggcccggccccgggaatggcgtgagcgtgagcggcggcagcgccagcgagagccgggagagcctggctgcgaggggagagacctggtgagcccctgtcccggtgaaactgaggcaggccctcccacctagctgtgtggcctcagataagacccccgcacaatctgggcctcagcacccactttgtgaacggaagggctgcaccagggcttctccaggcagggtgggaaaggtcctctccagtgctcaacctccccagagctccccagtgccaacggctttaagccgcaacttcccacagcccaccaggccctcatgccctggcctacctgatttctctggcctctgtccccacctcctctggcctgacctccatctagccacatgggccaccccaccattcct[135 bp omitted]gcctcccaaagtgctgggattacaggcatgagccaccacacccggccagatccacctctctgagcctctgtttcctcactggcaaatgaacaagggtcacttagccctccattactgcataagtgaactgccctttctgagctgatggcaggggcaagaggagggtggaggtggggcagggagaaagatgaatgcagacggtccctctcaggtcctcgttctctctactcaagttttactaccttttgctattctctaaacatggtgagccagtgcacatctcagtgccctctctagaacactctcccaccgatgtccacctgcctcactccctcctttccttcacatctgctcaaaagtcacacttttgttgaccagacatctcagggtgatggggttatgggcgatgcttcatagagggagtgttttttttgtttttttttttgaaatgaagtcttgctctcgtcgcccaggctggagtgcagtggtacgatctcggcgcattgcaacctccgcctcctgagttcaagcgattctcctgcctcagcctcccgagtagctgggattacaggtgcctgcccccacgctcagctaatttttgtatttttagtagagacagggtttca[131 bp omitted]cccagatgaaggtcaggttgacaacctttaaaaattagggaaggcttcctggaaaggggaaatttggggtcttgaaggatgagtagttcacttgggaaaaagcgggccattctctgcctcttttcaccccccaatcctaatccaacccagatcctctgacgcatcttagctgctcatctcccaacattttcatgcagcctgggctgtttcctgatacagctgttcacaaactccctacaacaatctcaaggaagtgacagtgttcgaacaccacaggctatgaggaagaaacgtcctctgtccagcccacttcctgacccttgcccactgagccacaggctcctctatggagatgataactgtttcctcaagtgtggctgtgaggttgccaatataaaacaggacccagccacttataactttcatacccgtatttaaagaagttgcgcctcccagagattctgctggaactgtatttcctatgtccacatctaaacaagggctatttatttttacccttcatttatcttaaagagttttctctgtggcaaaatacttcctgcattcctaccaaaacttaattttcagaaaggcatatctgtgccttccagctcactagtcctatggtggtggagttgtcagggcaagatctgaagctccctgggtcccagccttgggcagctcagggcctcgaacacaggaggcctggcacactggatagatgccttagcttactggaaagttgttgtttgtttgtttctgtttgttttgttttgttttgttttgtttgagacagagtcttgctctgtcacccaggctggagtgcagtgacgtgatctcggctcactgcaatctctgactcacaggatcaagtgattcttgtgcctcagcctcccaagtagctaggactacaggtgcatgccaccacgctggctaattttttctttttttctttttcttttctttttttttttttctgagacagagtctcgctttatcgcccaggctggagtgcagtggcacaatctcggctcggtgcaaactccgcctcctggcttcaaacgattctcctgcctcagccttccgagtagctgggattataggcgcctaccataaagcctggctaatttttgtatttttaatagagacagggttttg[132 bp omitted]agtagagatggggtttcgccatgttggccaggctggtctcaaactcctgacctcaagtgatcctcctgcctcagcctcccaaagtgctgggatcacaggcatgagccacagagcccagccagcttattaagtttaaatcagcacacgctggcagcctggggcccttgagccatccacagacaggcttcctttgaactggctgcaaccataaaaacaaaagaaataaaaaccagagctctagtttaaaagggaaaagtagcagattcgccaacaccaggtgcacattcctgagaagtggctgccccttctacacagggcattttcttctgaagccccactctgcctccctagcatgcttcatccgtttccctatgtcgtctggcccctgtgggcatgagtttgagacccctggtctaagtgagttgcaataataaaagcaggtgcttactgaatcccttgctctgattaagtgccttggatgtcctaattcatttaaccttcacagcaaccctatgacgtaggttctatccctgccatccgtttttggcagatgggtaaactgaggcaccgtgcagcaaggacatttgcccaaggccaaagagctagagagggggctgagccacgatgtgagcccaggtggtgcaggcttcaggacctgcattcatcactgccagcccgacccgacatgtttacccacactcaccctccgcacgcctcggaaacagccggacctcagccctgactgtgccccgcagcctcctcacctttgatctgctcgctgttcccctgagggggtcccaagtccaagaatagtcgtggcatctcggggcccttcctctcgggcttgggggggtccccgtctccgctgagtgccgtgtctccgccggccctgctgtctggggccccgggctctccctcgggggccacctccggcctggctctcgggggcgctggctccagcctcctcggctgtgcctccggtggcggtggcagcggtggcggcggtggctgcggcctcgtgttgtctacccatccggcctttgcgtccacgccgcttccggggccgccgccgggggccgtccccgtgcccactggggctcggcccccactcccgaggtccagcctcccagcccctggggctctcggcgcccccccagtctcgggggctctcctctcggtcccgggttccagcgtcccgttcttgggggctgggccaagggggccaggggctgtctccccgccgttccgggaggagaccactgcgctgggtgcaggggctctctccagagaggtctctggggctggctccccgatcgtgggggctggaccccaactctcgggcgtcttctcccagggccctggggctctccaaggcccagtctctggtggcctctccgtgttcctggggaatctcaggcccccattctctgacaccttgtcctcgctctttgggggtgtcaggcccccattcaccagcaccttctccccggcctctggggacctcagctccccattctccagcgctttctcctccctccttgggggtgtcagctccccattctccagcactttctcttctctctcgggggaccccagggccccattctccgccgccttctcctcgatgcctggggctctctggtccccgttctccagcactgtcaccccgttcactgggaggctcaggcttggggcttgtttcccgttgcccaggactgtcgggtccctgttcaggcccgggactttctctctgttcccggggcctctccccgccttcctgggtcctgtctcccgggctgtcgcccccttctcccccaggaggttccttgtcacatcctcccgcagggacatcagcagctgttccgtgctcacttgaaccacgaaggtcggcttctcccggggccccgggagtgggagcggacccgggtctggaggtggccggggcgctcctgggtcgggtggctcggggggagcccgcggccgagggaccccttcctcctcggccgcccccccacctgggaaggctccctctggggaaaaaggggtctcggtctcgtagccgctgtcccccggcttggggcccggcgacgagaggcctgaaccgggactggccacggccgaaggggggtcgggggacgcggccgggtccgcgggggcccgaggaggtggcggcgggggggggggagcgggaggtggcccccgcccggggtactggggcgccgccgcccccatgagggggtccagaaactcggggggggccgaggcggggggggccatgggcaagtcggccagggagccccgctctgcccgcagcgaggagtcgtcctcgggggggtgggggcagccaagagcagggtggcctccccagcctgctacggcgtccccccgctccagtggcaggcaggagcaggccccctcgcggctgcacaggggacagggtaggggaccccggcggcttgggccacctccaaggctgctgctgtcttcccctggggagctgccctcctcctcctcctcttcttcttccacccacggggcggtcccccgctcccccaagacctcggcagggtctcccgccagggtctccccggcgccccggccctcggggtcccagccgctcagcaggaagctgcctgacgctgaggactgggctgggaagggccggggcgcagggaagaggggggaggcccaggtctcggacaccagctgggggacctcggagggggcctggggggcctgaggggcgggcactcctgggtccagggggtcccagtcgttggggaagaggggctcaggaggggagccgtgctcctccaagcggatgtagtactcgctgctcacggaggggctgcgggcgctgatgacaggcagcacgctgggcgtggacagcgcctcgtagaaagggttggaggggttggcgtggggggccgggggggccgacgccggctgccaggcaggtgcccccccaccccggccggccccacgccgggccttctcccacaggcactcgaggttgaggccgcggctactctcggtgaccgtgagcacatcgtcggggtcggctccagggaagccatccagtagggggaacggtgaggagagggtccccgggcggggcgcactgtgtgcagggggccagggccaggggaagggaccgtctcggggtgggggtggcggcggtgggggccggggaggccgctcggagagcaagtaggtgagctgcaattggagatcagaggctgaagggcgctgggcaggtggccgccagcaggactgaagaatgtcatacctggggagaggtggggcagagtgagcagggcagagacccagggaggggaaagagacccagggaggggacagacaaccagagagagggggacagagacccagagggtaacagagacccagagagagggggacagagacccagagagagggggacagagacccagagacagagggacagagatcc[137 bp omitted]catggtgaaaccccgtttctactaaaaatacaaaaaattagcctagcgtggtggcacctgcctgtaatcccagctacctgggaggctgaggcaggagaaccgcttgaacccgggaggcggaggttgcagtgagccaagatcgtgccatcgcactccagcctgggcaacaaaagcaaaaatctgccaaaaaaaaagaaagagagagagggacagagacccagagagagagggacagagacccagagagagggggacagagacctagagagagagggaaacatagacccaaaaagtggggcagagatccagggagaagaggggacagcagacggtagagattcagaggaggtaactgggctggggagctgggtattgagacccaaagaagcaggggtggggggaagatgcccatagagagaggctgacgggacctggaggcagaggggacacagcagcagatgggaacggctggtgagggtagtggtgtccctgtttgcgctgtgagctctggaatcagacaggtaagaagcagggacctcttagggtgaagtgggttcaaatcacagctctgccatcccctgcctgtgtccccctgcaagtagcagatgctggcagaaagggtggggacagcccctcttcactcttgaggggtatggagggcaaacgggatgtgggtgatgtgggaaacgaggggggatgctgggaccatcctgggtggggtgcggcaggccaggagccccgggtgggctagccctcaccagtagtccgcgtaaggcagcttgagcctcggccgggccagcttcacatgctgctggcggaccacgaaggcgaggacctcctcgtctgacaggtggcggtagggctgggccccaaactcaaacagctcccacagggtcacccccagggacctgcagagagcagagagaggtcagagcccagccctgacccacccgggcctcattttccccatctgtagaaccggtggcatctagtaacccttccaccttcctggcctgcctcggcccccgcggcccgtggtcctcaccagatgttgctctcgcggctctggtccaccaccatgaaggtcccgtggagctccccgaggagctcgggcgccgcccagcgcagtgggatccacaggcgctctggggtcaggtagtagtcctcctgagggaaccagggcggtgtcaggcgggtcagggcaccccacagcccccatcccgacggaaggaagccctaccttgtagttgctgtgggccagcccgtagtctccgatgcgcacggtcaggtcagaggtcagcaggcagttgcgcagggccaggtcgctgcgggaagaacgcgaggaggtgagcgcaggggcagccctccagccacgccctgaccccgccctttcacactgactccacccctcccatgaccctgccccgccacactgactctgccccttccctctgatctgtctctcccctctgactgctttcactctcccctgctgtcttgtcttctccccacccctggttcctccaagtctcctctccttttcctctgcactggctcctcctcttattcatctgacccttctggcttctcctgcttctctgttgactcctccccctcctctcccagccacctctcctcatcacgtgaccctgcttccccctcacctggctccttccgttcctctcctggaccctcctcctctcctgactcctccccctcccctgcccccctcccctggctcctcttccctctcctggctcctccttctctcctggaccctcccctatcctggctcctcctccttctctcctggcccctcccctcccctggctcctcctccccctctcctggctcctcctccccctctcctggctcctccccttatcctggttcttcctcctcctcccctgacccctccccctcccctggttcctcctcctcctctcctgaccccttttcctctcctggcccttcccctcatcacctgaccccgcctccctctcacttggttcctctcattcccctcctggtcccgcctcctctcctggccccttctcctccataccctcctcggttcgtccctattttgtgtcagccagtcatgggtccgccccccctctagcccctcccctgaggcctcacctccttcccccttccccttagtagctcctcccgcggctccccggcccgcccacctgtgcacgtagttgtgggaatgcaggtgcgccagcccgcgggcgatctccaggcccatcctctgcagcgtccgcaggtctcgagggggtagctcaggggacaggccctcggggggccgctgggctcggaggtaacgcttcaggtccccctgggagggaggcaaagaaggtcagcaccaccagccgctcaggtctccagctagtcggcccggaggctggaatggcttctgctgtcactgggtagcccctctgagccttagtttcctctgctgcttgcagcaggtaataacacagcccatcttgcctgcttgttcaggccagcccccaggacaggcagcactcatgaaatgttagcgcatgccacacatcatctacgatgatgatgatgatgacgacgaagcccaggggcaccaggcttggccccggccttgtccagctgccccctctgcccttccccaaccccccaagaccctcaccagttgacagaactccataatcagcagaaacggcagcgtctccacgcacagacccaggcactggaggacattggggtgctgcaggctcctgtggagtgaggaggtggctgagttgggaaggcagccccttcctcttcatcctgccccaacccccagcagaaccaaactgctgcctccacccttttttgttgtttttgtttgtttgtttgttttgagacggagtctcgctctgtcgcccaggcgggagtcctgcctcagcctcctgagtagccaggattacaggcatgcgccaccacgcctggctaatttttgtatttttagtaaagatggggtttcaccatgttggccaggctggtctcgaactcctgacctcaagtgatccaccctcctcaggctcccaaagtgctgggattacaggcgtgaaccaccgcacccggcccactctacctttttgatctcagtttcctcacctcggagtctctctcctcgaccacaccccactccttccccaggtccccatctctggatggccctcactggcctgctcctgggggagcaggtccccagggacccctttacctctccttcctccttacacctcacctccaccttcattcctgccccagactcttctcagtcttctcctcctcgtccccacagcctcctcccagcctccctggctctagtctctccccttccctttgcctcacctgcttttcaccacacacagccctctgtcgatccccagcaccccaggatagagcgccggctctttgattcctcctgctcctccggctggcccaagagtcagctttatcccatgtgggttttcccaaacctgcaggcccttgcttaggcccgggcctttgcacctacagttttctctctctctctctctctcttttttttccttccttgcttcctccctcccttccttccttccttcctccctccctccctcccttccttcctctttgagagggagtttcattcttatcactcaggctggagtgcaatggagtgatctcagctcactgcaacctccacctcccgggttcaagcgattctcctgcctcagcctcccgagtagctgggattacagatgcccgacaccaagcctggctaatttttgtatttttagtagagacagggtttcaccatg[131 bp omitted]ctctcatcagagttctcttggcccctccgggcctctgcctcaacatcatctccccgggaagctttgctgcccccccaatgccaggttggataccctcccctttaccctcacgctgtgggaaagagtcagactcgggggtttgaaccctgactcccactttcctaggtgtgtcatctcaggcaagccacttcgctgctccctgcctcagttttcctcatctgtaaaaatgggacagcgataacaacttcctctgaggaattacatgagatctgagagaagctggtatgtgctgagatcctagcaattactgctgttttaatggcaacatattatttgattttattttcaccctgcattcttttttttaagacagagtcttgctctttcgcccagtctggagtacagtggtgcaatctcggctcactgcaacctccacctcccgggttcaagtgattctcctgcctcaactccgagtagttgggattataggtacacactaccacactcggctaatttttgtatttttagtagataatgggtttcaccatgttggccaggctgctcttgaactcctgacctcaagtgatccacccacttcggcctcccgaagtgctgggattacaggcatgagccaccgtgcccaggcttcaccctgcattctaaatgtatttccagggctgctcactctccatgagcttcttcctgtcctacatcctttgtacctgctgttccttctgcctggaatgtacttcccatggtgctttgcatggctgacttctccaagtcaacccggcctccctgatggtcctatccaaggtggcccctgtctctgtcacatactgcctcattttctcatggtatttgtcattctctgacagtttctctctctctctctctctctcttttttttttttttttttttttttttatgagacagagtcttgctctgtcgcccaggctggagtgcagtggtgcaatcttggctcactgcaacctccatctcccgggctccagcaattctcctgcctcatcctcctgagtagctgggattacaggcatgtgccaccatgcctggctaatttttatatttttattagagacgggatttcaccatgttggccaggctggccttgaactcctgacctcaggtaatccgcctgcctgggcctctcaaagtactgagattacaggtgtgagccaccacgcccagctgacagtttctctttttaaaatgcatttctggcttggtctggtggctctcacctgaaatctcagcactctgggaggccgaggcaggaggatggcttgaacctagaagtttgagaccagctggagcagcatagtgaaactccatctctacaattaaaaaaaatatatagtctgggtgcagtggctcatgcctgtaatccctgcactttgggaggccgagatgggtggatcacctgatgtcaggagttcgagaccagcctggccaacatagtgaaaccctgtctttactaaaaatacaaaataagctgggcttggtggcacatgcctgtaatcccagctacttgggaggctgaggcaggagaattgcttgcacccgggaggcggagattgcagtgagctgaggccccgccattgcactccagcctgggcaacaagattgaaactctgtctaaaaaaaaaaaaaaaaaagtctgtaatccgaatactttgggaggccaaggtgggtgaatcacctgaggtcaggagttcgagaccagcctggccaacatggtgaaaccccgtctctactaaaaataccaaaaattagccagatgtggtggtgggcgcctgtaatcgcagctactctggaggctgaggcaggagaatcgcttgaacccaggaggcagaggttgcagagagttgagattgcgccactgcactccagcctgacaacagagcaagacttcatctgaaaaaaaaaaaaagataaataaataaaaataaaagttagccaggcatggtggctatgcaggaggctgaggcaggaggatcacttgagcccaggagctcaaggctgaagtgagccttgaaaaaaaaaaaaaaagtatttatttatctattgtgtgtcttctccactagggggtgagctctcctaggataagaatttggtgtgtcttcctgcctgtgtcctcagtgcctagactagtagtagatgctcaataaacacaggtggagagaaggactggcttggaggtctgcaggaggatgagaacatttcaggcttgcagcccagggtctggccaggagtaggtgcacagtaacttactagttattttcctactggggcctggcgggaggcagagccacttgtgtgctgtggggccactgccagtacccagccttctattgcctgtgtgtaaccgcggctctgctgtttatgctgtgtgtcctcaggagaacagggtctcttgcttctgtttggtggaagaatcgtgtaacaaagtgttgttattgttgttgttttctcacgctgtctcccaggctggagtacagtggtgtgatcttggctcactgcaacctctgcctctggggttcaaacaattctcctgcctcagcctcctgagtagctgggattacaggcgcctgcccaccacacctggctaatgtttgcatttttagtagagatggggtttcaccatgttggccaggctggtctcgaactcctgacctcatgatctgcccacctcagtctcccaaagtgctgggattactggtgtgagccaccgtgcctggccaatttttttgtatttttgtagagatagggtttagcccaggctggtctccaagtcctgagctcaggcagtctgcccgccttggcctcccaaagtgctaggattacaggcaggagcccgacaaagtgttcatgaagctcctgccatgtgtggggcttcaacagtggctggagttcccagcatgggagacttggggtggctggtgtagaaggaagccaggattcactgcacacccacgaatctggccaaggccggccgctctgctctcaaatcctcccagcaacgtgctaggcaggatgatgatccccatttgatccagatggaacagaggtgaagcgacttgcctagggtcacacagctggtaatgatgggaacattgggatttgatctcaggtctgtggctcgcccagcaaacgtctactgagagccagcagcacttgtgctcgggtaacgagacagaccctgagctgctgctagtagagacctgcactgtccaacagagctttgcgaaggtgggaatcttctggaccagccctgcctaccaggggagccactggccacaggtggctattgagcacttgagatatgatgagggtggctgaggaaatgtgtttttaatttgattgcattttaattagcttacattttatttatttatttatataatagagacagggtctcgctctgttgcccaggtgggagtgcagtggtgcagtcatagctcactccatcctccaatttctggcctcaagtgatcctcccaccttggcctcccaaagtgccgggactacacgagtataccaccgtgcccatcttagcttaaatgtaataggcatatgtggccagtgtttgctggcacaggtttagggagagacaggcaataagcaagtaagcaaatgatatagtgacaacctggggtatgggttatgaagaaaacacatgccatgacggggtgaagcaccccaggaccctctttggaaggaggggaggagtaagggaagatgtctctgagctgaggcctgaggaagggaaggggccccatccacacctggggatgagcaaggagtgatattctagagaggatatagcaaggtccgatgcgctgcggcagggaattggcttccgtggggagggtcagtgaagaggccagcgtggctggggtgagggggacattggaaggaagggacagtgtcagactgcgcagggcctgtgggctgtcaggaggaccagatgtgtcctgtaggcagtagggagccatgggaggttttggagtgagggagtgccaaaacccaatgtgtttctcagggtaaagcccacctttacaactgttctgataaggggtctctgcgaacacaccctttccaaaacagggaactcactacctcacaaggaatttatctggcaaatggatacctagaccccatcctagaagcactgagagtggagtagagaccaagaagggcagggatggagctccacagtggcctgctcgggcacctgctcagggacctagtctgtggcctggggaagggaagtaccagctggtacccaacattggacatgggaatctcacatcctctcagctgccctcttcatgaggacactagggcttcctggactcactttccagatgaagatccggaggttcagaggggagaggagcaggcctctagctcagcttctgtgctcccgcctcctccaccatcctgcctctcacttcccacccttagctcggtccagaggaagaacctgaggttcagggagggaagttctcctgccagagctgcacaaccggaagaggtagattccaggtgtgaccccatacagcactccttccactcctgaatgtcacctcaacaaggcacacacccactgagaaaccctcagtacctgtacggctgtgcttccgagatgaacttgcgttgctccaggggccccgcgctggctcggagctccttcaccaccacctgggcgggggtgtagtcggagaaaatctctcccaggatcacctggtcaaggggcacccaggagtcagcgagtgccgtttccccagccccgtcccctgggaccagctccactccaccacacagctcccaacccccggctccttcccagcttctccctccacatcccaccacccttgacccccaccagacatggggtgagacactcacgggcccagaatccgatggacgcagggacggatggaaggatggacagacggacggacgcgtggagagccgggtggcgcggcggagtggtcaatggagtgaggagggaggcgctgactgacagatgtcggggatggggcgggtgggagccggtgagaggtggacggaggggggatgggaggctgagggggcatggggaggaggcgagggacagatgagaagtggtgagagcaggggtgtggacacagaacaggaggacagctcgggatccatggagccctgcctcccctccccagcccactcaccttcccaaaccagccactcccaatctcctgcaggtagctcaggtgctgccggctaaggcccaggggggtggtcatgtctggggagggcaagaggggaaagcccctgagtctctcccccttcctgagtgctaccaacacaccccaggtcagtggggactgagacagagcagacatcactctcttttcattggctgccacccacattccatgtcagaatctcagcttcctcattggctgctcacaaggctccagcatccaatcagtccttccttttggcatcccaagctcctatgatgtgatttcagcctcccattggctgcctctgagactgtgctctatggtaatctcaccaccgcttgccccttaaaaatccccaaatctggttttggattaagcaatggcttccaccaagatgatctttgtctgcctccccataggctgcttccaagattccagcgctcccacctatgcctttcccattggctgccgctggtctcaaccgccccagcccctgaaggaacacactcaacatcttctggcctttcccgggacaccatgggatgctggtcatggcgtggggcagtacctgagtgtgaaggctgcggggcaggcattggcagggagacctcagccagcgggagaatgtagacatcaggcagcgactgtgaggaggaggtctcctccgcagggggagtgtactccccggagcagtcctccccttcagggttctcaaattcctggggccaggagaggagaagaggggtgggagaacgcagggctgagagacacgccatcgtctttctcttaagtttgtctccccttcatttttgtaactgtctcccagtcccagcccaatttccatcccccatttccccatcccaaggctccagatcttgccatagcttcaagctggaaggtgctctcggatttactgcccccttctccccaccaaccacctgtgtagggggtaaaggccttgctggagtcttcctccccaagttgaatcccctcatgcacctcaccttgaagccgacatcgccccgtttgcagcacagacaggtgaggaggaggaagatgaaggccagcaggccggagcaggaaatgaggaccacagcgtagggaggagccagaggagcccggcccagggcgaatccatctgtgggcacagggctgggctggggtcccagcttcaagtccctggataccggaatcatgccccctcccgtcccggcacgtcttggactacaactcccgtgatgctctgcgaccagggtcccttggcagaggtgcagagtggcccaaggcattgtgggagttgtagtttggggccttcccaagtggttggattgggggtggggtctctcttctcgtcccaaactgggacccccgccacctcatcccaccccatcccctcaccccaggcttggatgaattccaatgagggttgaaggaaagaggagtgatagtgaagtctggagcttgcagaatttaaaatacgctcccgtggacagcctcattacccctcgttggggaggaggactagctctcagctgcaggctgggagaagattcttgccccatgctggaaccccccagtttgtggggttgagatctgtctcttttagggacgcttggcgcacaccgatgttctctatccccagcccaagacccagagaagggaactccgcaagccctgggtctctccagaagccagagacagcctcccgtgttgtgtcccccttagaaatagtattcctgtcctctgcccccaattctcccagaggccctgtccttccccttcttcctgcacacaccagcacaaacacatgcgtgcacgcatacacacatgttgcccaaacggagccccctccccacccagcccccagcctccctcccacaggccctgctgacagaggcaccgtccccgccgctccgggccctgctgggctgcgggaagacgcgcaccaggtgacggggcaggacccgcagacagacccctgggcagacagcgaggccgccgcgggggtgggggccaccggacagactgatggcccgacagactcaccggggtgggccggggacgccaggcagccggaggcggagacggccgcaaggaggatgagggcgccgggggcaggcatcttgtcgaggatggcagggaggtggaggtggtggcggctggggaggaggggggggcgggccctcagcccccagccatggggacccgcgcgaccctggcctcctcccggcccaggagaggggcaggagacgcaggacagggggagggaggggctgcttgctggctcaggtacccccctccccctctttgaagggacagacggatgaagggatggagaggcggacagaggagagatgctggggagccggggttgctggggtgggggggagagggtaggatggggggggcgagaaagagggccccgcccccgagggcagccaggattgggggagcagagagcctgtcacaggaagggtgggaggagggaggatggagcgtcgtcatggcaactggctcccccgtagcattggctgccaggagggaggggaggaaatgggagggggagggacagacagggaccggcacacacttgcagcgggggtgggggggcagggcccacgggtgcctggcccggacaccgctgtgacatgccaccagcatggacacatgtgctacacgctaagatgcagatgtcaggcacgcgcagcccacacacagctgacacacgtcgcagggaccctcatagacaagcgcatcacatacaaaggtggacagccatcagcagacggggacacgtacacgtcacacacaaagacgcagggaccgcactggaaacgcacaggcaggccagcttccagcacagatgcacccggccacgcaggaacgtcaaagcatcacaaagacccacacatgccccggacaaagtaaagccccagatccacagacgcacacgccacagacaaagatccccacggacaccactgtgacatgctgacactcatagtcacagccacgcagacagtccctagacaaatgggcaacaaagaatacccacagacacaagtatcacatacatgcacgtcacacagacatgcacagacagcaattgcacagacacacgcagacacacacatcacatgaactaacatagacacggacacagcagctacacagagacaggcacatcacatacatgagtacacagaaacataatacatgcatgtatacggacacgtaacatgcatcactcacacggacacaagcttcactcacatggatacacacagacacactacatacacatgcatgcgggcacacacaactcatacatacagggctacataaatcacatgcaaaaatacacataaatacaccacacactgatacatacagacacatataacatgcacatatacacagtcacacatacataagcacagacataggcacacagatcaaatacacagacacacagagttgcacacatcacatacctaaacagacatggacacacacatcacaaatacacacacctttcacacaaggttacaaagacacagaaccccaccacagtcacacatcacatacataaacacacactggcacacataacacatacaaagagtcacacacccacaacacagacacagacacgcgcacagacacacgggtcgcaaatacccacgtttcccgtgcggttacgcagacattacacaaccacagcacttgcctcatacaaaagatacatgatcatagtttatttaatgtatttattcttatgagtatttagtctgtgccaggtatcgtccgcagcgttttacacgtacagaattacctctcaatcctcacaaccgccctctgagacaggtattttttaatcatgcccattgtacagatgaggcaactgaggcacagcgcggggtagtcacctgccccaaggcacacaagccggggagtggcaaagctgggactggaacccggtccatcggggacaccgacacatcagacaaggacacacatacatcacgtgccaggccgccgccgtctcggggtcacatcccaccctccagcgccccgagctgcagacacacccggaagcgcggactcccaccctgggcgcggacctctccatcgtccgtgagcacctgcgaggcgttcccctgggtgaggctgggccggagctgcgcacccaagacgcagcctcagcaacactcggcgcaggcgacccagcccccaaccccaacccccagcaggggcccagggctttccaccaaaacgcgcagccgtggcgcacaccggccgggcagtgcacactccccgcagagcgcagccgtcctcatcggggggctcaggggaaggggctgccctcagggtgtctcattggagaaactgaggcaggttcatcgcgggagggagggggcgcacggcctaggctgcagggtggaggggatgcaatcggggggcggggagtgagaaaagacgcaattcgctgcccgggtggctgaagggcacagaacctggcggaagcagaggcttatgggaggtgtagtcctggccttgagacttgtaggaaatgtagtcctgctcgacccagcaaggaggctcagattaagctgcggttggatgcgggtagcaggagccgaggaagggtccgctgcctgggtctttggaagtgatgtgggcagaattatcaagtcctagggagcggcacaggcggggctgcagtcctgactctggccccagctcgcttgttcatgtattcactcaacgaacgtttactaggtgcccactatgtgattaggcaggcgctgggccagaagctggggctgcagcaggaagcaagtgagacgcgttccctcaccttctgggagtctcgggggttcaaggaaagcagccacgagtggaataattgcacatcaggacttagcactgccgggcaccactgagtcagggtggggatggagtgggtcttgtctggggagtaacagagggttccctagagctttccaaactgtgagcgcccagccattagcaggggtgatatcaagatcctcggtggtctcagaaacaaagtcactctctgaaaagaaagaaagacaaaaaatcctccgtggcaatcagcactttttttttttttaatgggggccgggcgtggtggctcatgcctacaatcccagcactttgggaggccgaggagggtggatcatgagatcaggagatcgaaaccatcctggccaacatggtgaaactcggtctctattaaaaatacaaaaattagctgggcatggtggtgcgtgcctgtagtcccagctactcaggaggctgaggcaggagaatcgcttgaacccaggaggcagagattgcagtgagccgagatcgccgcgccactgcactccagcctggtaacagagcgagagtctgcctcaaaaaaaaaaaaaaaaaaaaaaaaaaaaaaaaaaaaaaagagtatcagtctgtttaggtcagttttatcaccaaacttgccctaaaactttttcctttttgacactttattgatttcaaaactgaaactacatgtcagtggttctcaaagtatggttcagagtcgcttaggagtccctgagaccctttcaaggggtccatgaggtcaaaagtatttgtatactaccctcctgagatgttaactgcctttttcgttctcattcactcataagtggacagtagaagtttccagaagttgcctgacatgtaatgaatggctgcactgaagacagacacagatgcaaggatccagccagacattaaagagatgtgcggccgggcgcggtggctcacacctgtaatcccagcactttgggaggccaaagccagcggatcacttgaggtcaggagtttgagaccagcctggccacagagtgacagagtggaactctgtcaaaaaaaaaaaaaaaaaagattttcaaaatgacacaaacaatgccactcaatgcactgaatttttttggaaaatagttttttttttttttgagatcgagtttcactctcgttgcccaggctggaatgcaatgggggcgatcttggctcactgcaacctccagctcccgggttcaagtgattttcctgttt[134 bp omitted]tggccttccaaagtgctgagattacaggtatgaggagccactgccactggcttttttttttttttttgagatggagtcttgctctgttgcccaggctggagtgcagtggtgcaatctcagctcactgcaacctcctcccaggttcaagtgattctcctgcctcaacctcccgagtagctgggactacaggcgctcgccaccatgcctgactaattttttgtattttagtagagacggggtttcaccgtattgcccaggctggtcttgaactcctgagctcaagtgatccacccgccttggtctcccatagtgctgggattacaggagtgagccaccacgccctgccaaatagttattatttttataaaaataggtttatacgttaacttgcaatggaaacccagtgctttgggaggccaaggtgggaggatcccttgaggtcaggagttcaagaccagcctgaccaacatggcaaaaccttgtctctataaaaaatacaaaaattagctaggcatggcggcgcacgcctgtagtcccagctactcaggaagctgaggcacaagaatcgtctgaacccaggaggtagaggttgcagtgagctgagatggtgccactgcactccagccggggttacagagcaggactctgtttcaaaaacagcaacaacaacaacaaattggctgaatgaaggaaagaacgaggttatttcctgcaggtgcatttgatgactgattcaagccaggaccactcccctgttgcttgggtgttgtccactcagcacaagtttccagccgatgggttatgactgtccattccagggaagaggaagagcaagctgtcatgaggacgcagaagggtgcactgcactgaaccagggttccttgcagagaagcctccagagaggatgacgtttaggcccggctgtggctgggagcagggttgagtctgaggctgggggtggggagctgagcagggagggcattccaggcaggggccacagagggcacaaaggcctggagctgtggaactgcttgggacctttgggaaacctgcacctgccccgcccaccacctccccagcgtggtggctccgacccaaaccttccagtcactgctgactggctgtctttttcccacacctccacgtccagtccattagctgactctattttcaaaatattcccagaatctggccacctctcaccacctctacttccaccctcgttgtttgcttggactattgcagtagcctccttgatgatctccacactcggcccctcaccccatggtctcttcttgctacagcagccgaggaagcctcttaactccgaagttagcccatgtccctcttgtgctctcaactctcccacggctcccatctcatttggagtaaaggccagcatcctccccacggcccacgcaactccaaattatctggccccccgagtctgtttgccctgttcgctggtacactttgccttgttcattcccttccagccatgctggcctcctccctgttcctccaacactgcatgggcaagaaacagctttggggcctttgtactcggcgccccgcgttctctggggactccccgttccccaggtctgcacctggctgacgtctttctttcagttaggcttctgcccacgtgtggcctccccagagatgctttccttggccaccaatggagcagccctgacccttacccccttcttgtcccttaacccatttcatttttctttcttttttttttttttttgaaatggagttttgctcttatcgccccggctggagtgcaatgatgcgatctcagctcactgcaacctctggctccccgggttcaagagattctcctgcctcagcctcccaagtagcagggattacaggcacccgccaccatacctggctaatttttgtattttcagtagatactgggtt[186 bp omitted]acctctgcctcccggattcaagcgattctcctgcctcagcctcctgagtagctgggattacaggtgcgtgccaccacgccccgctaatttttctatttttagtagagatagtatttcaccatgttggccaggctggtctcgaactcctgacctcaggtgatcctccagactctggcactcaaagtgctggaattactgcagctggtccctgtttcatttttcttcattgcaatcagctccacctgacttggggccgcatattcgtgcatagagccctggagaacaaggatctttgcttttgtttcctgctgtgtccccagtgccgggtacacagaagaagctcagtgactgtgactgcaggaatgaagctgggatgatagggagagacagccccagcagtgggcagaggttgccagaggctctgtctgcagagccaaggagttgagtctccacttggaaagcgagtgtgtgcgcagcagggtaaccagggtgaccaggctgcaggatggcggggacacagcctcctcctcttttatgaaattgaagcaccattagggtatgagaggctgggggaggaatattccatgagcccaggatgctgcctcagacttcattcactaactcattcattcattcattcattcattcatccattcagcaaacaaacaagcctccattccagcagcctggttgggtggacaaaaagaaagaagctgaagggacagcaatatcaataatgatattttatttcacctttttttttttacttttaaaattttttcttttcccacacctgccaaaacagcatttatttcactctttgttttttttttagacagtgtctctctgtcgcccaggctgcagtgcagtggtgcaatctcggctcactgcagccaccaccttctgggctcaagcgattctcgtgccttagcctcctgagtagctgggattacagacacgcaccaccacgcctggctaatttttgtatttttaggagaggtgggctttcgccatgttggtcagcctggcctcaaactcctgacctcaagtgatccgcctgcctcggcctcccaaagtgctgggattataggtatgggccaccacagcctggcctatttcactattaatggaggtataatttacaacaataacaagcagagattttttttttttttttttgaggcagagtctggttctgtcgcccaagctggagtgcagtggcgcgatctcagctcactgcaagctccgcctcccgggttcacgccattctcctgcctcaggctcctgagtagctgggactacaggcacctgccaccatgcccggctaattttttgtattt[152 bp omitted]atcacgatggcgcagtcttgggtcactgcaacctctgcctcccgggttcaagtgattctcctgcctcagtctcccaagtagctgggattataagcatgcaccaccacacctagctaatttttttgtgtttttagtagagatggggtttcaccccattggtcagactggtctcgaactcctgacctcaagtgatccaccctcttcagcctcccaaagtgctaggattacaggtgtgagccactgcgcccggccaacaagcagagatcttaagggtacaatttgaggccaggcatgatgactcatgcctgtgatcacaacactttggactttgcactttggtgcaaagttggagagtttgagaccagcctgggcaacatagtaagaccctggttctacaaaaataaaaattaaaaaataatctgggcatggtggcgcacacctgtagtcctagctactcaggaagctgaggcaggaggatcacttgaacccaggagttggaggctgcagtgagctatgatcgaactactgcactccagcctaggtgaca[223 bp omitted]ggctgaggtgggagaattgcttgaagccgggaggcagaggttgcagtgagccaagatcacgccactgcattccagcctgagagacagagtgagactccatctcaaaaaaaacaaaaaacaaaaaacagaaaacaaaaaactggagaacacgatggcctgggaagaaaaagctccaagagctccaagatataatgtgaagtgaaaaaaatcaagtcacagaacaatgagaatagtgtgatacaatttacataagaagaaaacaagccgggcgtgggaacatttcttgtagttccagctgctcaggagactgaggcaggaggatccctggagcctaggaatttgtagtggcagtgagctatgatcatgtcactgcactcctgcctgggcaacaaaggaagatcccattcccatctctaaaaataataaaaaaacagaaagcaacaacaatcccaagctgcttttttttttttttttgagacggagtttcgctctttcgcccaggctggagtgcagtgtgcgatcttggctcactgcaacctctgccttctagtttcaagtgattctcctgcctcagcctccctagtagacgggattacaggcgcccaccaccacgcccggctgatttttgtattttcagtagagatggggtttcaccatgttggccaggctggtctcgaactcctgacctcgtgatccgcccctctcggcctcccaccaaagctgcttttttctgtgtgtgactgagtcttgctctgtcacccaggctggagtgtagtaacgcgatcttggctcactgcaacctccgttccctgggttcaagcagttctcctgactcagcctcctgagttgctgggactacaggcatgcaccaccatgccctgctaatttttgtattttagtagagataaggtttcaccatattggccgggctggtcctgaactcctgacctcaagtgatccgcctgcctctgcctcccaaagtgttgggattgcaggtgtgagccactgcacctggccccaaagatgctttttgatatatgtacacacacacacacacacacacacgcccagcaaaagatgtgcaaggatagtatagtaatgaaactcggggtgcacatgaaatgtgaggtctgtatcactcaatatttttgttgtttgagatggagtctctctctgtcacccaggctggagtgcagtggcatgatctcagttcgctgcatcctttgcctcccaggttcaggtgattctcctgcctcagcctcctgagtagctgagactacaggcatgcgccaccacgcccggctaattttttttttgaatttttagtagagacagtgtttccccatgttggccaggctggtctcaaactcctgacctcaagtgatctgcccaccttggcctcccaaagccctgggattacaggcataaaccattgtgcctggcctcaaatttttaaaaaagaagactatattcatacatactaagtatccctatatttttatttgttcatttttatttatttattttttaagagacaggatgttgttctattgcctaggctggagtacagtgacaccaccatggctcactgtagccttgccttcctggactcaagcaatcctcctgcctcagccttctgagtaactgggactacaggtggacaccaccatgcctggctaattatttcatttttgtagagacagggtctcacaatgttgcccaggctggtctcgaacacctgggctcaagcaatcctcccacccaggcctctcatagtgctgggattacagacatgagccaccacgcctggtctctctctctctctctctctctctctctctctatatatatatatatatatatatattattattattattattatttttcctcttttcttcgagacggagtctcactctgtcgcccaggctggagtgcagtggcatgatcttcactcactgcaacctctgccccctgggatcaagcaattcttctgcctcagcctctgtagcagctgggattacaggcatgtgccaccacgcccagctaattttgtatttttagtagagacagggtttcaccatgttggccaggctgatctcaaacccctgacctcaggtgattggcccacttcagcctcccaaagtcctgggattataggcatgagccatcgcgccctgcttttctttttttttttttttgagacggagcctggctctgttgcccagactggagtgcagtggtcgatctcggcttgctgcaacttctgcctcccgggttcaagcgattctcttgcctcagcctcccgagtagctgggattacagggacgctccatcacgcctggctaatttttgtatatttagtagaggtggggttccaccatgttggtcaggctggtctcaaactcctgacctcgtgatctgcccaccttgtcctcccaaagtgctgggattacaggcttgagccaccgtgcctggccccgggctccatatattttaaattgtcgtttaaaacttaggtggtcaggcgcagtggctcttgcctgtaatcccagcactttgggaggccaagtcgggtggatcacctgagatcagaacttcaagaccagcctgaccaacatggcgaaaccccatctctaccaaaaaaatacaaacattagctgggtgtggtggcacgcatccatagtcccagctacttggggaggctgaggcaggagaattgcttgaaccctggtggtggaggttgcaatgagctgagatcgcgccactacactccagcctgagtgacagagtgagaccctgtttcaaaaaaacaaaaacaaaaacaaaacaaaacaaaaaagaaaaggaaggagaaggaagaggagaggtggataattgatgttgggtatcaataaggaggatctgcattttaagttaggcctgttcataaaatatcttgaatgccaggacagttgcttggattgtattctctgggcagtggtgagtcatgggaagttttggagcaaggtagaacatccataccccagcacagcagttaatctttttctttttttcagggacaggagtcttgctatgttgcccaggctggaatgcagcggctattcacagaataatcataccacaccacacccttgaaaccctgagctcaagcaatcttcccacctcagcctcccaagtagctgggactacaggcacccaccaccatgcctggcttagcagtcactttttaagagatgacttccttggcaccacaatctagattatttccttttctatatgctctcaaagaacttggctcctttatttcatagcatcttgttttattagcatattatattgagtaatataattaggtagtgtaattataaatacttgactcccactgcaatgctggtgtcaggcaagcagggactgccttggtcttgattgtagttatagatctggaagctagcttaataattatctgctgaacaaatgaatgaatactctagagctgttgtttaaaagatagcaactcttccatccttccagaagttctcatgactgaacccacctaactgtggttcaaaggttcttggccgggggtccagggaccctcaaaagtcttgtggatataatttatggggtctatggccttagataagaagaaaaatcacaaatcacattttccttttccccaagctctaattgatatctagtatttcttcgttttttttttttttttttttttttttttttgagacggagtctcgctctgtcacccaggctggagtgcagtggcacgatcttggctcattgcaagctctgcctcccaggttcacgccattctcctgcctcagcc[135 bp omitted]cagcctcccaaagtgctgggattacaggcttgagccactgcgcccagctatttcttcctattttcatgtcagattgtattttccaaagatagcctcaataatatctcccattccatatgctcttccagatcttgccacttccccattgggaagtgaagactatgggaagtgaagactatgtctccacaccttgaacctgaagggactacctcaaccaacaaggattcaatagaagtgcttctgtgtgacttctgaggtcaggttgtaaaaatgccatgccttgttttcttagtacaaacactcttacaattcagcttccatgatgtgaggaagcccaagagtctgtgaggaggcccacatggagaggaaatgaaatccccagccctcaattccctctgagctgctagccaacagctagcaccaattcttagaactcagcctccgtgctgtgaggaagctcaagagtccacgaggaagcccacaaagagaggaaattatgtccccagcccttagtccccactaagttgctagccaacagtcagcactaacttgccagccatgtgagccatcttgaaagtggtttcttattagatgcactgaagacatgaatagaaaaataaaaataaaatacagaaagtgggttcttcagctcccagaggagctgcctcaattgttgcctcattgatcagagatgagctgcctctgctgaactccacccaaattgaagacctacaaacaaaataaataactactattgtcttaagcaattaagttttgcagtggtttgttacacagcagtagatgactcatacaattatgaatacaggtaacattagcaagatctgtgattttgtttattctggaatttattattctagcaacataaatcacagatatttccaaatcacatcatggttgttgcaaatacttgaaatattcttttgcttcctcactgttttgaaatatcagttataggccagacgcggcggctcacacctgtaatctcagcactttgggtggctgaggcaggcaggatcacctgaggtcgggagttcgagaccagcctgaccaacatggagaaaccctgtctctactaaaaatacaaaattagcctgacatggtggcatgtgcccgtaatcccggctactcaggaggctgaggcaggagaaatccttgaacctgagaagcagaggttgcagtgagccaagatcgcaccattgcactccattccaggcaacaagagcaaaactctgtctcaaaaaaaagaaaagaaaagaaaagaaaaagaaatatcagttattagacttgctattagatctgctagattttttttttttttttttgagatggagtctcactctattgcccaggctggagtgcagtggtgcaatctcgactcactgcaatctctgcctcccaggttcgagtgattctcctgcctcagcctcccgagtagctgggattacagccgcacaccacaacacccagctaatttttgtatttttagtagagaaggggtttcaccatgctggccaggctggtcttgaacttcttaccttgtgatccgcccacctcggtctcccaaagtgctgggattacagctgtgaaccacaacacccagcctgatttttttttttctttttaaatagtgacagtgtctccctatgttgcccaggctaattaaactcctgggctcaagcgatcctcctacctgggcctaccaaagtgctgagattataggcataagccactgcacatggctggatctgctagatcttgttatttaatgttaataaagaagcgtatatattatataaaaatgtgacttttgaatattttgaaaactgttttagttggttttgtaagcctatgaattttcttttatacacttaacttttttgagaaggtattgtcagggtataatattcaaaaaacagttaaaaacatgattcatacaaatatatagtaagcacacatctaggatttatttaatacattaatgggagaaccaaaagaatgacagacttgttcaaaggaggataggacaggccaggcacagtggctcacgcctggaatcccagcactttgggaggctgaggcaggcagatcatctgaggtcaggagttcaagtccagcctggcaacatggcaaaaccctgcctctattaaaaaaaaaaaaattagctgagcatggtggtgcgagcctgtagtcctagttacttgggaggctgaggagaatcacttgaacccaggaggtggaggctacagagagctgagattgcaccactgcactccagcctgggtgacagagcgacactctgtctcaagaaaagaaaaagagagaattctagatgaaaatgatgaatttatagagaaaaacagttaataacattcagaacaataacttttgggattttatgtctacccaaaaaacaataatttcgatgcattggttctgaacaagttaacatataactttacagagtttagacccttaatcaatagaaagtcatacaaattcccccagagtagtggttggcaaattgtggcccacagatcaaattctgcccatttttgtaaataaagttttatgggaacatagtcacatacattcatttatgtgttatcttattatcacttatgagctttttgcatgacaccagtagagttgagtagtggtaacagagaccacatggcttcaaagccttaaatatttatctgaccctttatagaaaaaaatttgcctccccattcctagaatatcagatgctacttaagtggtcttgttagacagtgcccttagagccctaatgtccaataaggtagccaccagtcacttagctatttaaatttaattcagatgaaataaaaaacaaaaaattcagttctcagttacactctctatttcaagtcttcaatagccacatgtggctagtggcttttgcacagttcaggtgtgttgcaaagtgttaccctgggaagcactgatgtcgaataacataggaagtatacactgtttgcattatatccagagttcagttaatctttctcaacaaggcccaaggcctgctaaagaaatatttcagttattcattactgcattaaaaaaaatccccccaatatgtagtggcttaaacaacgatttattatttttcatgataccatgtgttgactgggctctgcaaggcagttcttctgttcatctcatttctcttggagtctctggtcaaattggagtcaggtagtggcacggactggaacttttttttttttgaggcggagtctcactctgtcacccaggctggagtgcagtggcatgatcttggctcactgcaacctccgcttcctgggtccaagcgattcttctgcctcagcctcccaagtagctgggactacaggcatgcacaactgcgccgagctaatttttgtatattttttttagagatgggggtatcacc[139 bp omitted]tggcgttgtggtggggtagctgggagggttgcaatgatctctctccatgtagtctcttcacatggctgcttggaccccaaaagggagagtttcaagaggacaagcccaaacatacaagtactttaccaaacttctgcttgcatcatgtttgataatgttgtactggccaagcccaatatcccatggaggggactccacagggtgcaaacatctggaggtgtggttcactgagacccttcagggtccatggtgcaagaacaggttgaagacccccccttgaatttccacctgttgtatgagtccctttcacccatcctgagcagccaccacatcccactgagtctacgtagctcctcaacctaggtaatgcctggtgctcagtgtgggtcctagtgcagctgctgcaggctctctgccctggtgacaggctggcttccctccatcaagatttggaagggagggctctacctggtgacttctctcttgtccaagggggtctctccagatctgggctccttgccccagcaccaccagtcccactttttttttttttttgagacagagtctcactctgttgcccaggctagagtgcagtggcgcgatctcggcttactgcaagccccgcctcccaggttcacaccattctcctgcctcagcctcccgagtagctgggactacaggcacctgcaaccacgcccagctaattttttgtatttttagtagagatcgggtttcactgtgttagccagggtggtctcgatctcttgacttcatgatccacctgcctcagcctcccaaagtgctgggattacaggcatgagccaccgcgcctggcctaccagtcccacatttctaatgtcctatcagctcctccagtctccctggaatctcttcctctaaatctattgtgtctgccctgcccagggcttttgaaattcaaaagccaaaaatggccttctttgtcgtctgcattctgccttttcctgtgatatggcctcagaaagctagagctgttgcctgaacgaatgggtgaacaacagtaaacatttgtg[141 bp omitted]agaaaccgtctctactaaaaatacaaaaaattagccagctgtggtggcaggtgcctgtaatcccagctactagggaggctgaggcaggagaatcacttgaacccggggggtggaggttgcagtgagccgagatcgcgccattgcactccagcctgggcaacaagagcgaaacttcatcgcaaaaaataaataataaataaatcaatcatctccaaactcaaaacaatcattgtttattatctcatgatttctgtgagtccagagtttggtgtttcatgtggttacagtcagatatcaactggggctgtggtcatctgaaagcttgactgaggctggatgatttgccacctgggcttgttcacatggctggcatgttggagctggcaagatggttcctctccacagagctgcttgagtgtcctcacaacatggcagccagcttcccccaaagcaagttatctatggtggaagttgcaatgccttttgtgacctagtctcagatttcttttactgtcacttctgttacattcctttgatcccataagccaaacctgattccatagggaggagactacacaaagatgtgaccactgggtggcgggaatcattaggcgccatcttggaatctgtctgctgcaatctggggctgatatcacatgcagttaaaataactgaaacttggccgggcacggtggctcacacctgtaatcccagcactttgggaggccaaggcaggcagatcatgaggtcaggagttcgagaccagcctgacagacatggtgaaactgcatctctactaaaaccataaaaattagccgggcatggtggtgggctcctgtaatcccagctactcaggctgaggcaggagaattgcttgaacccaggaggcagagcttgtagcgagccaagctcgcaccactgcactctagcctgggtgacagagtgagactccctctcaaaaaataaataaattaaataaataaataaataaataaataaataaaactcatccatctccaattgtctaggacactctgatctttccttccttccttccttccttctttcttttttttgacacagtttcgctcctgttgcccaggctagagtacagtggcgcgatctcggctcaccacaacctctgcctcccctgttcaagcaattctccggcctcagcctcccgagtagctgggattacaggcatgcaccaccacgccgggctaatttttgtatttttagtagagacagggtttttccgtgttggtcaggctggtctcgagctcctgacctcaggtgatccacccacctcagcctcccaaagtgctgggattacaggcgggaaccatcgtgcccggccgatttatctttcaaagccgtggctgaaacgttccccactgaccaatgacactgctgccagcccctggggggaccacgttgctctgttcccggtgacgtagctgccttaacgcgtccagtgggtcgtcccaattcccctctggctttgcacttgtgtgtttgcacatctgctgttaatttaaatgagacaaaaatcctcactctctttaaatgcagagaatacagagttgtgggttttattttacctttttttacaaagagaaaagagcgtgatgcatactaaggatcctctgttggctccacaaaggcgtcttctaagtatgcctttggaattcagagccggcagttaaattctgatgaccaaatctgagaagtaagagtcgtggttttcttggggatggagggaatgggaatgagggctcccgggataagggatggggatgggcttttgggaggctgggaatgttcttttttttttttttaacctggttgcagcataactgatgtgttcatttggaattaattcatcaagctgtacacttttgaaacgtgttgtctctttttttttttttttttttgtgacagagtctcactctgtcactccggctggagtgcagtggcacaatctcagctcactgcagcctccgcctcccggttcaagcaattctcctgcctcagctgcccaagtagctgggattacaggtgccgtgttatcttatgtttgtacagtataacccaataaaaactataaaaaatgttattgacagggaaacaaataatcaaataagataacaaatcagagtcaaagactgtttagaaacaggattgtccagtggttaagagcctgggctgtttatatttgaatcccagtgtgccaccaaggctgtgtagctttgggtaagttactcaacttctcggaccttaaagttgtatatctgtgaaatgaagacaacacctacgtctacctcaatgagaagcaggaaatatgattaagaattgagtttaggactgg[273 bp omitted]caaaaaaaaaaaaaaaaagaaagaaagaattgagtttaagactgggtgtggtggttcacacttgtaatctcagcactttgagaggccgaggcaggaggatcacttgagtcccagagtttgagaccagcctgggcaacataatgagactcccatcactataaattttttttttaattagctgggcgtggtggcatacacctgtggtcccagctatttgagaggctgaggcaggaagatagcttgagcccaggaggtcgaggctgcagtgagctatgattgtgccactgtactccagcctgggcctggagtgagatcctgtctctaaaaaacaccaaaacaaaacaccacaacaccaaaacaccaaaacaaaacaccaaaacaccaaaaaaaaccaccaaaacaaaacaacagggtttactcaagcacaaagtttgagatagccagactctgaaagaatgtggtgattcttaagtggggaagaaaaggtttcacttatgtaggcagaaacagagaagtttaacagcatttaacatgttccatacaaagccagtacacaacgttctgtgatatgatcggtggcagtttgctagattttaacgaagatttattttttggtttttttgttggtttgtttttgagtctcactctgtcgcccaggctggagtgcaggggcgtgatctcggctcactgcagcctctgcctcctgggttcaagcgattctcctgcctcagcttcccaaatagctgggagcacaggcacatgccaccacgcctggctaaattttatatttttagtagagacggggtttcactgt[140 bp omitted]tgagggggtctcatctctgacgccattccattacttctcatcatttccaggaagaagcagaagttgcagttgctggctgcatgactcaagccacttagatttctcttgaggctcaaaataatgtaatgttccaatagctttaagtttgaatgatttaatttcacacctaccgggcagaattacctgagataaatagaacaaagcatctagccaggtagttgtcacagagcagatgttcaatcaatgacattcatatcgttttgg[134 bp omitted]aatggtgaaacctgtctctagtaaaaatacaaaaattagtcagttgtggcggcgtgtgcctgtaatcccagctactcaggaggctgaggcaggaaaatcacttgaacctgggaagcagaggttgcagtgagacaagatcatgccactgcactccagcctgggtgacagagcgagactccagctcaaaaaaaaaaaaaaaaaagaaaagaaagaaagaaagaaatagaaaatgcagaactgtcatgccaataaaaaatggacaaggacgtgaacagacaagtcacaaggcagaatgacagtagattacaaactggtgggaaggtatttatcctcagtactcactgtttttaaatttctttgtgtgtgtgtgtgtgtgtgtgtgagagagagagagtctcactctcttgcccaggctgtagtacaacagctcaatctcaactcactgcaacctccatcttccaggctcaaatgatcctcccacttcagcctcccggaaagctgggggactacaggcgaccgccaccacgcccggctaattttttttttctttttttttttttttgagacggagtcttgctctgtcgcccaggctggagtgtagtggcgcgatctcgactcactgcaagctctgcctcccgggttcatgacattctcctgcctcagcctcccgaggtagctgggactacaggcgcccgccaccacgcccggctaattttttgtatttttagtagagacagggtttcaccatgttagccaggatggtctccatctcctgacctgatgatctgcccgcctggacctcccaaaatgctgggactacaggtgtgagccaccacaccacgcccggctaattttttgtatttttagtagagacagggtttcgccatgttgcccaggctggtcttgaactcctggactcaagcgatccgcccactttggcctcccaaagtactaggataaaaaatttattattattgttatttttcattttttatagaggtggggtctggatatgttgcctcaggctggtcttaaactcccgggctcaagtgagccttctgcctctgcctcccagtgtgtcgaggtcacaggcgtgagtcactgcaccggccagtagtaactgtcttcagagcgtgtattgttctctgaagtaatcaagtccacttatttgtctgtatgtttaccgtccatctcccctcttctcatcccttagaaaatgaggtccctgccaggcacagtggctcaggcctgtaatcccagcactatgggaggccgaggtgggcagaccacgaggtcaagagttcgagactagcctggccaacatggtgaaaccccgtctctattaaaaatacaaaaattagcctgggctgggcgcagtggctcacacctgtaatcccagcactttgggaggctgaggcaggcggatcacctgaggttgggagttggagaccagcctgaccaacgtggagaaacaccatctctactaaaaaatacaaaattagccgggtatgctggcacatgcctgtaatccctgatactcgggaggctgaggcaggagaatcacttgaacccgggaggcggaggttgtggtgagccgagatcatgccattgcactccagcctgggcaacaagagtgaaactctgtctcaaaaagaaaagaaaatgaggtcctcgagggcagtgcttctgtgtcagtcttgctcactgctgtctcccagtacctaaaacacaggctaccatacagcaggtgctcaagaaactatttgtggactcaatgagtgaatacataaatgaaaatgagagccaactcttcacttaccaaattagcaaagctctctaaaaggcttatattcagtgccagcgaggatgccgtgagtgtgaatgagtggagattattttaacttttctagatgccaacttggtactcttaccgagtaattccatttctgggactctgttctaaggaaataatataaaatgtgcacaaaagtttatgcacgaagattttctctatagcattatttgtagcagtaaaaataatagaaacaggtttaatatttgtataataaacattatatatttctaacaataaggtctagagaaaggctttgtaaactacagaacagcaatattgtgaaatatcatgtaattattttaattaaaatgaaaaaaaggttttatgatacattaagtagaaatacgcagggccggacatggtggcttatatctgtaatcccagcactttgggaggccaaggtgggtggatcacctgaggtcaagagtttgagaccagcatggccaacatggtgaaaccctgtctctactaaaaatacataaattagccgggtgtggtggtgcgcacctataatcacagctactagtggggctgaggcaggagaatcacttgaaccccggaggcagaggttgcagtgagccgagattgtgccactgcactccagcctgggcgacagagtgacactccatctcaaaaaaaaaaaaatgtgtaatacagcaagatataaaatgatatacggtcatccattggaatccataggggatttggttccagaaccccacctaccctacagataccaaaacctgaggatgctcaagtcgctgatataaaacggcatagtgtttgcatagaacctgcgtgtatttcccctgtttatttatttatttatttatttattttttgagacagagtctctgtcaccccaagctggagtgcaatggcgcgatctcggctcactgcaacctccgccttctgggttcaagagattctcctgcctcagcctcctgaatagttgggattacaggcatgtgccaccatgcctggctaattttatttcattttataataaaattttattaatttaatttaattttattttatttatttattttgagacggagtttcgctcttgttgcccaggctggagtgcaatggcacaggctccgctcactgcaacttccacctcctgggttcaagcaattctcctagctcagccttccaagtatctggaattacaggcacacgccaccacgtccggctatttttttttttttttgagatggcgtctcactctgtcatccaggctagagtacagtggcgcaatcttggctcactgcaacctctgcctcccgggttcaagcgattctcctgtctcagcctctggagtagctgggactacaggcgcatgccaccatgcctggctaacttttttgtatttttagtagggacgggatt[132 bp omitted]ttccaccatgttggccaggctggtcttgaactcgtgacctcaagtgattcacccaccttggcctcccaaagtgctgagattacaggcgtgagccaccgtgcccagcctcctcccgtgtattttaaatcatctccacattacttggaatgcctaacacagtgcaaatactaagtaaatagttgttatactgtattgcatagggaataatgacaagaaaaaaagtctatacacattcagtacagacacaatttttttcctgaatatttttgattcactgttggttgaatccacggatgcagaaacccacggaactggtacgcagtagcacctcctctctctcacactatatatagagagaggggattttatttatatatgtcaacgtagtgtaaatgtaagttttcatatatacatgtgaaattggtaggacaacaacaggatgctaaccacacaattttacaaagataaaacctggaaatactggaagtagatgtatcggaatgctatcactggtgggagaaatgtgactccttgctgggggacatactgttatctgtgggatgtatctcctcgcagagttttttttctgtatatttttcccacatatttatttatgtatttttttaaatttttatttatttatttatttttgggtggggagacagagtgtcgctcaggctggagtgcaatggcatgatcttagctcactgcaatctctgcctccgggttcaagtgattttcatgcctcagcccccaccagtagctgggaccacagtcaccggccaccacgccctactaacttatgtatttttagtagagacggggttttgccgtgttgttcaggctggttggtctcaaactcctgacctcaagtgatccgcccaccttagcctccaagtagctgggactacagatgtatgccactatgcctggctaatttttttattttgtagcgatgaggtctcactatgttgtccaggctggtctcccactcctggcctcaggtgatcctcccaccttgacatcccaaagtgctgtgattacaggcctgagccaccgtgcatggtcctatttattcatctattttgtagagacagggtcttgttctgttgcccaggctggaatacagtggtgtgatcatggctcactgcaaccttgacctcctgggcttaagccatcctcccacctcagcctccaagtagctgggactacagatgcatgccaccatgcctggctaatttttttattttgaggtctcactatgttgtccaggctggtctcccacttctggcctcaagcgatcctcccaccttggcctcccaaagtgccaggatttcaggtgggaaccaccgcacccggtctcggtttgatcactttaattggctgcattgcattgcaagaatgactgtatcttggtttatttaatttttcccttatgcacggcatctgggttgtttccagcttctttcccatgacaaacataaacaacactgcagtaaacatcactgagttcacgtgatttggagatgtggaaattcaggaacgaagggggcccttatctaaatgtcaaccgacctgtcccatggcctccagagagactgcatgtccctcctcctccattgttttgcaattctcagcttttctattttgagcttgtgttatttttcttatttatttatttttattttaattgaagttctgggatacatgtgcagaacacgcaggtttgttacataggtatacatgtttcatggtggtttgctctatctatcaacccatcatgtaggttttaagccctgcatgcattaggtatttgtcctaatgctctccctccccttgccccccaccccccaccgacaggccccggtgtgtgatgttcccctccctgtgtctatgtgttctcattgttcgactcgcacttatgagtgagaacatgcgttgtttggttttctgtttctgtgttagtttgctgagaatgatggctaccagcttcatccatttcccttcaaaggacatgaactcattcttttttatgactgcatagtattccacaatgtatatgtgccatattttctttatccagtctatcattgttgggcatttgggttggttccaagtctttgccattgtaatgtttatttatttattctttaagataagagttttgctctgtcgcccaggcctgagtgcagtggtgcattctcggctcactgcaacctccacctcccgggttcaagcaattctcctgcctcaggctcccaagtagctgggattacaggtgaccaccaccacacctggctaatttttgtacttttggtggagatggggtttcacctt[138 bp omitted]gtgaattcttcccagtttgttgagagagctgtgggtctatggtgctgaggggagtagacaaagcccctcctcctgacaccccaaaccaatgggggagacagacagagcttccgacttccttagcttggggactggcttttaaaaaccgcacagggctgggtgcggtggttcatgcctgtaatcccagcactttgggaggccaaggtgggcagatcgcgaggtcaggagttcaagaccagcctagccaatatggtgaaatcccatctctactaaaaaatacaaaaagtacaaaaaatagccacgtttggtggcctatgcctgtagtcccagctactcaggaggctgaggcaggagaatcacttgaacctgggaagcagaggttgcagtgagccgagatcacgccactacactccagcctgggcgacagagtgaggctccatctcaaaaaaaataaaaataaaaataaataaaataaaataaaataaatgaaagtaaaaattgcccaggagccaggtgtggtggctcacgtctgtaatctcagcactttgggaggccgaggcgggcggatcatgaggtcaagagttagagaccagcctggccaacatggtgaaactccgtccctactaaaaatacaaaaattagctgggcgtggtggtgggtgcctgtaatcccagttactcagtaggctaaggaaggagaattgcttgaacccgggaggcggaggttgcagtgagctgagattgtgccattgcattccagcctgggtgacagggcaagactttgtctcaaaaaaaaaaaaaaaaaaaaaaacaaaactgcccaggaaattcttacgcgcagtcctacgtggggactagcggcccagagctactgcttattaagcatttattatgagccaggaaaggtgcaaaatgttttatccttgagtctagttcatgcctccagcagaagcccaggcccctgggttctagcatggtcttctgccagcttcgacttggacaagtgacgtcagtgccctgtatgttggttttctcattggaaagatggagataataatagtgcctactcataggatcatcatgaggctgaaacgcgtagctgtgcagatctcttggcactgtgccaggcactgagtatgttctacacaagtgtttgacaaatataataaaactgatggctgggcacctgtaatcccagcactttaggaggccgaggcaggtggatcacttgaggtcaggagttcaggaccagcctgggcaacatggtgaaaccccctccctactaaaaatacaaaaattagcggggcatgatggcgggcacctgtaatcccagctactcgagaggctgagacacgagaatcgcttgaacccgggaggcagaggttgccgcgagccaagatcgcaccactgcactccagcctggatgaaagagcgagactccatcccaaacaattaacaaaaataactgactgtgtatcttggagtgacagagctgtccctgcttgtgtaatgtgcctatccatgcattggcgaggcgtgtcgatcctgcagctgggagagagtttgcatgggaggaggcagcgtgagagatcagtccccaggcacagaggaaaaccgagctgggactcagctctcacggtcctgccattcagccagctgagaggcacagtcccacatccagacccttacttgtgctgtctcctctgtccagaacactctttcctttcctcacctccttcaaaggcttgttccaatgtcatcatcttggtttaaagtggagattcagcttaaccccttccccacctgtgcctactgtctctcgattggccttattcttctccatggccctcaatgtacacgtttacctggaaagtgctccctgcaaggcagctgcataccattattaagactctgtgacaggccgggcgtggtggctcatgcttgtaatccagcactttgggaggccgaggcgggcggatcacttgaggccaggagttccagaccagtctgaccaacatggtgaaaccccgtctccactaaaaatacaaaacttagcctggtgtggtggtgagtgcctgttatcccaggtactcgggatgctgaggcaggagaatcgcttgaacccgggaggcggaggttgcagtgagccgagatggaaacactccactccagcctaggtgacagagcgagactccgtctcaaaaaaaaaaaaaaagaaaaaagaaaaaaaaaagactctgtgactacatatatacacacacacacacacacgcatatatatatatatatatgcgtgtgtgtgtgtgtgtgtatatataggtgtgtgtatatatatatatatatatatatataattatacacacacacacacacacacacacacacacacagagatgaggtctcactatgttgtccaggctggtcttgaattcctgagctcaaccgattcttccacctcactcccccaaagtgctgggattacaggcgttagccaccacacctgggctactaatatgtatgtatgtatatatatatatatatatatttttttttttttttttttggatacagagtgttgctctgtcacccaggcttgagtgcagtggcgcgatctcggctcactgcaagctcctcttcccaggttcacgccattttcctgcctcagcctcccaagtagctgggattacaggtgcccgccaccatatccagctaattttttttatttttagtagagatagggtttcaccgtg[136 bp omitted]cccaggctggagtgcaatggcgcgatctcggctcactgcaacctctgcctcccgagttcaagcaattctcctgcctcagcctcctgagtagctgggattacaggcacctgtcaccacgcccagctaattttttgtatttttagtagaggcagggtttc[137 bp omitted]ggtgtgtgggccaccagctcctcccccatgttctctgctctggccgcactggcctcctttacattcgtctatcacaccaggcacctttccaccacagggcctttgcactggctattctcaatgactgcaatactcttgccccagatatgcacccagcttgctgcctcacctccatcaggccacctcctctgagaggcccaccttgactgcccacctaaagcatctcttagtttagccaggcatggtgttgagcgcctgaagtcccagctattcagaaggctgaggcaggaggattgcttgagcccaggagtttgataccagcatgggtaacatagccagaccccatctctacaaaaataaaacataaaaaattaaggctgggcgcaatggctcacgcctgtaatcccatcactttggaaggccgaggcgggcggatcacctaaggttgggagttcgagactagcctggaca[138 bp omitted]cacggagaaaccccgtctctgctaaaaatagaaagttagctgggcatggtggtgcatgcctgtaaccccagctactcgggaagctgagcaggagaatcgcttgaacccgggaagtggaggttgcagtgagctgagatggcgccattgcactccagcctgggcaacaagagtgaaactcagtctcaataataataacggtaataaaataaaaaattagctgggtgtggtggtgcatgcctgcctgtaatcccagctactcgggaggctgaggcaggaaaatcgcttgaacccaggaggcagaggttgcagtgaaccgagatcgcgccattgcactccagcctgtgcaacgagagcaaaactccatctcaaataataataataataataataataataataataataataaaataaaataaaataaaaaactggctgggcatgggagcacgtgcctgtaattccagctattcaggaggctgaggcaa[145 bp omitted]tgggaggtcacatgttcgcactttctaggattaggacccgaacatctcttgggggggcaatgttcttcccaccatgagtccgttctcactttttttttttttttttttgccactctgtctccagcgcctggaacggtgcctggcatgcaacaggtgctggggaatgaatgaacgtgaatggatggggcccagcggcaggaagggctggaagcatgtgtcatggagcatgttttcagggactgagggccaaggaggaagccaggcccctggaggaagtgggggcagtgccctggcccgaggcaggaggaggaggagccgaacagggatgagcaagatgagggtgggaggtggaaagatgaagcagcgattggggcgtcctgttctcctgtaatccggcctcctgcccacccatgcaccaccctcgggctgggcgcaggcctccctgaagccactgcagggaaggggggtatcggagggtggtggtgcacggtgattcccaactggcacagctggtttgactggtcctggcgtttggcagaggagagcgccggggacaggtgaggatggtgctgggagcaccccaggcccaaaagacacaggggaggagtggctaccgtgctcaccggtgtacccctatagaccccagaccccccaacacaacactcccaccgcacacccctcacttggctcagtctgtcccagcccaggaaaccagaaacccaacctccctgacccccagtcccagcccttcctccctcagacccaggagtccagcccctcctctctcagacccaggagtccaggcccccagaccctcctccctcagacccagaggtccaggcccccagcctcctccctcagatccaggagtccaggcccccagcccctcctccctcagatccaggagtccaggcccccagcctcctccctcagacccaggagtccagacccccagcgcctcctccctcagacccaggagtccagacctccagcccctcctccctcagacccaggagtccaggcccccagcccctcctccctcagatccaggagtccaggcccccagcctcctccctcagacccaggagtccagacccccagcgcctcctccctcagacccaggagtccagacccccagcccctcctctctcagacccaggagtccagacccccagcgcctcctccctcagacccagaattccaggcccccagcccctcctccctcagacccgggaatccaggcccccagcccctcctccctcagacccgggagtccaggcccccagcccctcctccctcagacccaggagtccagacccccagcgcctcctccctcagacccaggagtccagacccccagcccctcctctctcagacccaggagtccagacccccagcgcctcctccctcagacccagaagtccaggcccccagcccctcctccctcagacccgggagtccagacccccagcgcctcctccctcagacccgggagtccagacccccagcgcctcctccctcagacccaggagtccagacccccagcgcctcctccctcagacccaggagtccagacccccagcccctcctccctcagacccaggagtccagcctccagctctggttccctgacacattgtcactacagccgtggcctgttgggccccctgctctgtgtgcacctgcctctctccccaccctgttccccttttgtgaccatgcagccagtaaggacccaggttctggccttcagtccccccaccccactcccccagcatccctccccagtctctgtcaccttggggacccaggagccggcactctcagtggccccctcccaagagaggagcctaggcgtggtgtggggcccaccccaagtggcctccagcccagccccagcccagctcagggcaggcggggcatgagtgtgagtgtgagtgtgcggggtggggcgggcggtggtatcggccctgggggcctgtgccggcacatcgtggggatggagtaatcagggtggggtggggagcagacaaggaggtttcgctgcaccccaagatggacccagtgattagaggggacggctggggggaaccagcgtggctttgaggtgtcagccgccatctctcaccccacccatctgaggttgcctgagcctcaagggggcattgcgtgggcttggggacaggggtgtcctctaccacccgtaacctccccccaacccccttccccaggtccacatgtctaagtgtcccatttttgtctgtctgggtcactggggtctggcccaggcccctcctccatcaaacccaggagcctggtcccccagctctggaccgtgcccccttcccaccccattcgggttcctccttggatccttcctgacttgggatttggacgccccgcccccagcccctgccccctcgggaacccagcctctaagcagccagggctggctgtcctcgggctcccagaactcccggcaatgactggcttttaatggaaaggtcgggctctggaggtgacaatggcctcgattctgtggaaacgtgacctcatgacccagtgacctccctttgcctatgtctgagctccaagagcaaaatggcacatcccagggcttggggggcaggtgggcccccccaagagaggccaaggaattgctccacgatgggagtcccctgctgtccaccctcagcccattggcaaggccacttccaatgcccccttcgcaatcagcccaaggtgtagaacaggagacagcctccttgtggtcggtggcacacaggtgacgtgtccatcgtgctttgggtttatgggagtggagggcatgtcctgagtggcccagcccatccccacctgccacccttaagcccccagggatgggtgtgagtgtccctggacgccctcactgtcaacccctacccaggaacccaggactacctccctatccccagtgctattctttgttttgggggcttttgttttgttttgtttgttttgttttttgagatgaagtttccctcttgttgcccaggctggggtgcaatggcacgatctcggctcaccgcaactgccgcttcccgggttcaagcgattctcctgcctcagcctcccgagtagctggattacaggcatgcgccaccacaccgggctaattttgtattttcagtagagacagggtttctctgtgttagtcaggatgatctcaaactcccgacctcaggtgatctgcccaccttggctgcccaaagtgctgggattacaggcatgagccaccgcgtctggcctgttttgttttcgtcacccaggctggagcacggtggtgcaatcatagctcactgcagcctcaacctcctgggctcaagtggtccttccacctcagcctcccgagtagctgagaccacaggtgcaccgacaccatgctcagataatttttaaattttttgtagagatgaggccttgtagcccaggctgatatcaaactcctgagcttcagcgatcctcctgcctcagcctcccaaagtgctgggattacagaggtgaggcactgagcctggcccccagaggccccctctttggcctggaggaaacacctcccaatgtctttccagcctctaggcctttgtctctgccaggctttctaacaagacgccttttccaccactcaagtcccacttacccatctggtgagttcctctgtccttggttttgcctactggggcatccttttcctgggaagtcattcctggcctcccaagaaggtcctggcctctacagccagggtatcaagcacatggaacttagcccaagccagcagtcaatacaaatagcctccaagcacacacca[138 bp omitted]cgtggtgaaaccccatctttactaaaaatacaaaataattagctgggcatggtggtgcgcccctgcaaccccagttactcaggaggctgaggcagaagaatcacttgaacctggaaggcagaggttgcagtaagccgagatgcacagatcgtgacagagtgagactctgtctcaaaaacaaaaaagaaacaggtaaaattaattgtagttttctccagctttaagactggaagggccaggtgtggtggctcacctgtaatcccagcactttgagaggctgaggcaggaggatcatgaggtcaggagttcgagaccagcctggccaacatggtgaaacttcatctctactaaaaatacgaaaaaaaaaaaaaattagccgggcatggtggtgggcgcctgtaatcccagctactcaggaagctgaggcaggagaattgcttgaacctgggaggtggaggttgcagtgagccaagattatgccactacactccagcctgggtgacagagcaagactccgtctcaaaaaaaaaaaagactagaaggaaaaaagaaaagaaaataattaattgtaggaatagattttattcaatttgatgtatctaaaatatcaccacttcagcatgtaatcaatatagaaattacccatgagatgttttatatgctttgtatctcaattttgatgctcaatttcgaaaaggtacattaaaatggaattaattaaatgaaaatttaatttcatttaaattaattaaaatgaaataattttttattttttaaaaatttttaaaatgaaataaaattaattcattttaattaatttaaattaattttaatttttttaaattaaatttatttaaattaattaaaatgaaataaaatggaaaattttcactttctcagtcacattgcacataggtgctaaatagccacctatggccagtggcttctgggatggacagcacagatgtaagccatttacttacatgtcttgtttgtggacacaatatcagagactgacccagaggaggtctctacagatattagttggaaaaatagactattggatgcctggatgaatggatgagtggatgcatggatggatggatggatggatggatggatggacggatggtcgaatggatgggtagatggttggatggatggatgaatggatggaggatgcatagaaagatggatgcatagatggctggttgaatggatacctggctgagtggatgaatagaggatggatggatggatagaaggatggttgagtagatgcttggatggatgaatggatagacagtgatgaatggatggcaggatggatggatgaatggatagatgaaggaatggttgggtgatggatgaataaatggctgaatgaatgcaggatggatggatagatggatggttggatggttgggtggctagatgaatggatggaaaatggatggatgggtgatggatggctggatagatggatggttgagtagatggttggatggatgaatggatggatagatgatgaatggatgaagaggtggatggtttgatggctgatgaatggatggagggatggatggttggatgggtagatagatggatgttgaatggatgattggataagtggttgggtggctgaatgaatggttgggtggatggtcgggtggatggatgatggatgaatagagggacaggtggatgcatagatagagggatgaacagctggagggatgaatggatgtataatccttgctcctctcactacccatgaccaagtggctctgggttttccacttgcattttcccacactcttcatctttttttttttttttttttaattgagaccgagtcttgctctgttgcccaggctggagcacagtggcacaatctcggctcactgcaatctccacctcctgggttcaagcaattctctgcctcagcctcctgaggagctgggattataggcacccaccaccactcccggctaatttttgtatttttagtagagacggggttttactatgttggccaggctggtcttgaactcccgacctcgtgatccacccgcctgggcctcccaaagtgctgggattacaggcatgagccaccaagcccagcccactccttcatccttctggtctcgtccttgtctcccagatgtccaagaccctcagattcatttctgggggttgatggtctccactagtatctctgcactctcacaattggctaaaatgtcactctggtgtcttctggttcctccttgccacctctgtaggagtctggacccctcgccttccagaatcaggcttttgcatctcctcagctccctcctcattctccacagagattcagtggacttctcctggcaccaccatgaccttcactcattccatcacgtcttcctgtgacaattcattcattccatcaacaggcacttattgagcatttactatattccaggctcttcccttgggaaataaccgcagatttgacatagaacaagcccttctttcatggggttgacagtctagtggggagatagatggtaaacaagacaaagaagcaaaacatttaggaggtcagatggtgacgagtgctatgggaaaaagtaaaacaggaaagaggaatggagaagttggtggacgagcctgggggaggtgacactgggcagagtcagacgataggagcccacgaagctcccaggtatcaggaacatgcgggaatagcaagggcaaaggccctgcagtaggagcctcccctgggtcttaggccgcctagtttggccagtttctttccattgcccactcaggcacaacctcaggccctactgctccccaaccttcctgtgccccggggatgcctccgcacctgcctgcgagtttccctctcaggatccctaaggacctgggcattcccttccccagactctccctaaccccccaccccagcagcacacagagccagggacaaagggtcattgaatagaaaacaaaggtgaagacagcccagccggaggcctggtggggtgtcatggttcagtcccccacctccgacatcagaggggttcactcagcctcagagggggatgcctggccctctcacccttccacccaccctgcaagagagcctttttatcagcaggaacatcaaggcttaacactgaaagtatcaaggcagaatgttgaggatgtggactcggtagtggctgggggcaggggcgggtgctcccacagctcagcctcctggagacgggtcttggggtggtgaattgagagatgggataccccagaaccctccttttctgcttaccatcagagtgaaggcgggcagtgctgtgtgccctgggggaagccacattacctctctgggcccccttcctgcatctgttaggtgagtctgacgtcttccatccccctcacctatgcaacaataattggtcagtatatacaattttatttgttttggctttttttttttttctttttgagatggagtttcactcttgttgcccaggctggagtgcaacagtacaatcttggctcgctgcaacctctgcctccagggttcaagtgattctcctgcctcagcctcccgaatagctgggattacaggcacctgccaccatgcccagctaattttttgtatttttagtagagatggggtttcactatgttggccaggctggtcttgaactcctgacctcaggcgattcacccgcctcggcctcccaaagtgctggaattacaggcgtgagccattgcacaggctttcttttggcattttttttttttttttgagatggagtctctctctgtcgcccaggctgcagtgcagtgatgtgatctcagctcactccaacctccacctcccaggttcaagcgattctcgtgtctcagcctcccaagtagctgggattacaggcacctgccaccactggtggggagactggcttcatgactccaggactctgaggggtcagggaccaacagctggggagggccagggtttggggtgggggcagaagagaagagaacaccgtctatgctgagctcactgtgtaccagatcctccaccagcagctgagagtgtctccctcagtcctcacaacagcccgatgggtgccattcacagatggggaaactaaggcaagatgagcctatgagcaagatggttcccggccccacagctgggaggcactggagctgggatttgaaccagggctgtgaccttcagactctcacgcccaaccatatctggcagttgtctctcatatctgtgtctctccctgtccctgacctttctatgtatctctgtctctgccctctgtatatcgctgctgggtctctcagggtctctgacccctgtgtgtctctgtctcctctgggtgtccgtgtgtctctgtctccgccctccgtgtatctctgttgcgtctctcaaggtctctggcccctgtgcatctcagtcccctcctggtctctgtctcccatgccctctgccctctccctttctccctggctcccgccctgtctgtgctgccgtggtcctggctgtgcctctgtccctgtgtctgtttccagggtgccccttacgcgtcagcccgtgagggcaagtttctgtctgccccttccccagcggtggcctagtgcttggaacagcgcctggcagacaggagatgctcagtaaatatttctcaaatgaataaaggaatgaatgagtgaatgaatgaatgaatgaatgaactcgctgagatgggcgagatcagcgccatttcccaaatgagcaacgtgggctccaggtgggtgcccacaggcccagaactgccagcccggaaggttctggcgtgggcttggcactgaccccctggactctgcccccagctgagcaccagacgccaggacgtgcccatcactgctcctccccgccctcagagcagggtggctccctctggcctctccccgctgttggaggcgtgggtagcagctgggagaaccggctgggtgctgcccctccccttgggccgggcacggagtaggcacctggcgggctccccaggtggcagacgctgtcgctgcgcacacctggcctctgtgccgcctgctccctgctcgtcctcccctccccaccctcacccacctgccatggacgggcccgccgagccccagatcccgggcttgtgggacacctatgaagatgacatctcggaaatcaggtgaggcccagacctgggcaggagccaggagatcccagggaggaggtggctgtttgggggagccggggactgtggcaagggtggcctccagccacccgcagccgcaggcctggcccagacttagctggaggggctgggctgggctggggcatccagtgtggtgtataggtccctcctgagaagggagtgaggacccgaccgtgttgagtcaccagtggggatgcctggggtgtccctgtcgctctccgggcctcagtttttctgtctgtcaaaggggcccacaagccctgtgtctccctgatagagcagtggaagagagcaggcagcttggtgcatagtagttgctcaggaaacacaacagcctgtagtacccaggacaccccatgcaagccctgaaataacgggggtgcttgggggtgaaatgggagagactgggatgctgctgagacccccagagggagaagctgtgttctagggcacttggggcggagagggcaggctctggactcttcaggtctcctaacagtggttagggcagagcactgcccacttccatgagctcagcgtgactccctcttcctggggatgagtcagacactttgacagtacctgctttccagatggggaaactgaggctgggagggaacgcgacatgaccgcaattacgcagctagaagcaaatctgaacccggtctgtctcacgccagagcctgtggtttctcctgctcctcacagccttggtgatgtcccctttacacccctccccgtggctccatcttttaggggagcgcagaggcccagagagggcaggcagcctgccccagatcacacagcaaactgctgagacaatctccaacccctcgtatcttgcactcttgccaagtgagaccttcctggcagcctgggcccctccagccaccgtgggctgtgaggagggagacaaccaagacctgttctcagcccagttgcctcattcctttcttattttattttatttttttgaaatggagtttcgctcttgttgcccaggctggagtgcaatggcacgatatcagctcactgcagcctccgcgtcctgggttcaagtgattctccagcctcagcttcccaagtaactgggattacaggagcccgccaccatgcccggctaattttatttttgtatttttagtagagaaagggtttc[136 bp omitted]ctcccctccctcagccagaagctggggcatgaagaggccttcctgggtgcctgggactccagagacaggagcagttcaatcctgattgctgtgtgacctagacaagcttcctgatgtctctgggcctcctgggctgagagctgtgaccaggctggcccagttctgcgtgagggaggccccagcattctttactcaacattgtctaatccaggacttctgagttctgcaattcttctctccagagataaacagataagccagctcgcctccagggttcccgcctctgggaaggcctcacccccaccccagccaggcacctgggagccttttttttatctccgcgacggctctgccagctggtcataaaacgccctgagtgacctcgctaagtgggtgaccttggtttagtcactgaccctctgcgaagctcggtttcgtcatcgtgggggagaatagccctcccctgcaagactcctccagccctgatggctgcagagccctgggggggtgcccttaggacctcaaacttccaggcacttctggaatcccccaggcctggaagcgtgcctctccccagcgagcctgctggagcatccccctggggcccacttccttcgggatgtgcccctcccagaccccctcagatacgccacgtacccccccagattcgcacctcctcccaggttgcccatctcagggatgtcccctccccatcactggctcagatccacagggcttctcctggccccgacttccccctctgctcgcccccagcctgtcagtccccaacccccacccctgtcccctgactctctgccctggttcttcctctcggttgccacagccccagctcaggcctcctcatctccccccaacctcaccactccagccttggctgtcccaggctgctcctcccctcctcccagccatccagtgaattcctcagcgcccagccctcacccaccccgcccccccagcctcctcacctgcattccagctactctactgctttttttttttttttttttttttttttgagactgaatctggctctgtcacccaggctggagcacagtggaacgatctcggctcactgcaacctccgcctcccaggttcaggtgtattacctcatctaatcctcacagccatctgagatgaacccactttgactgctgtcatcctgtgtcagagatgaggcccagagaggttgagtaacttgcctagggtcacacagctgccaagcagggcacggccaggatttgaaccagggaagcctgactgttatcatgccctggacagggaatttagggatgatgagcaagaccaggaaggagcgagatccaggaggtagactcagcccagatgggaggtgaagcgggcgctctgaggttctagcctccgagtagctgggatgacaggcgcgtgccactgcgcccagttaatattattactattatttttttgagacggagtctcactctgtcgcccacgctggagtgcagtggcacgatctcggctcactacaacctcggcctcccaggttcaagcgattctcctgcctcagcctcccaagtagctgggattacaggcacccgccaccatgcctggctaatttttatatttttagttgagacaggatttcaccatgttggccaggctgttctcgaactcctgacctcaggtgatccacccgccttggtctcccaaagtgcagggcttacaggcgtgagccaccgtgcccggcctatctactctattactttgaattccctggccacgcttgttccctgccacagtgcctttgcttatctggctccttccatagggatcccagagacatcttctctctctctctctctctctttgcttatctggctccttgcatagggatcccagagacatcctctctctctctctctctctctctctctctctctctctcttttgagacagagccttgctctgtggctcacactggagtgcagtggcacaatctcggctcactgcaatctctgccttctggattcaagtgattctcttgcctcagcctccagagtagctgggattacaggcatgcgccaccacacccagctaatttttgtttttttttggagatggagtcttgctctgtcacccaggctggagtgcagtgatgcgaacttggctcattgcaacctccgcctcccaggttcaagcgattcttctgcctcagcctcctgagtagctgggattacaggcacactctaccatgcccggctaattttttgtattttagtagaaacggggtttca[131 bp omitted]tttcgccactttcgggactttgcgtgcaccagcgcagtgtcctttgcctgggctgacctctgccctctctccttcctttgccaaacttctcaggcgttaagattcaacacgggcaatttaggatttttggccaggggaatgagagaatgcaggcagacacccacgccaggtcccaggtccctgatcacgctggtctagcttcaaatctgccccgtggcaccaaaatattggcctgttcgtggataggaaatgaatgtaggaaatctgtgaaaaggacgtcaagaatgaatgaatgaatggaggctccattaagcaacctctgagccggagcttccaggatgagtcagggttagcagacggggaggaggggcagggagtgctgggaaagggaatggttggggcacagggacacaggtggcttcaggagagtaaggggcagctgggtcaggagagggccagctgccgtggaaactccccgtggtgggccatcctgcagcagacctgagtggctctcaaatggttcgttttttaagcacctccagggagagaaactattgttttcagaatacacgcatatgtgatttaaaaaaaaaaaaaaagttgccagctcagtggctcacacctgtaatcccagcagtttgggaggccgaggcaggtggatcccttgaggtcaggagttcaagaccagcctggccaacatggtgacaccccatctgtactaaaaataaaaaaattagccagagttgtgccacacacctgtaatctcagctactcaggaggttaaggcaggagaatcgcttgaacccaggaggcggaagttgcagtgacctgagatcctgccactgtactccagcctgggcaacagaacaagactctgtctcaaaaaaaaaaaagttgtcctaggccaggcatggtggctcctgtccattgcagtactttgggaggccaaggcaggagtatcatttgaggccaggagttcaagaccagactggacaacacagcaagaccccgtctctaaaaaaataaaataaaaaccaaacaaggaattgaccagaatttaattcaggatagcagctcaagggacgggtagatgccacaggaaggggcccagagatatcagcaagatgcatcgctcagaatgttctagtttatggggttcattatgaattatgagaaatttaatatgtgagatcgggctctgtggctcatgcctgtaatcccagcactttgggaggctgaagtgggcggatcacttgaggtcaggagttcaagaccagcctggccaacatggtaaaaccccgtctctactaaaaacacaaaaatttgccaggcgtggtggcacttgcctgtagtcccagctactggagaggctgaggcaggagagttgcttgaacccaggaggcggaggttgcagtgagctgagatcgcatactgcacaccagcttgggtgacaagattgaaactccatctcaaaaaaagaaaaaagaaatttaatatgtgttccatgtggtcttgtatgtaaaaaggacttaaaaggataataagggctaaattaaaatcgtaagaggccgggcacggtggctcacgcctgtaatcccagaactttgggaggccgaggtgggcggatcacctgaggtcgatagttggagaccaggctgaccaacatggagaaaccccgtctctactaaaaatagaaaaaagtcagccgggcatggtggtgcatgcctgtaatcccagctactcgggaggttgaggcaggagaatcgcttgaacccaggaggcggaggttgcggtgagtcgagatcgtgtcattacactccagcctgggcaacaagagtgaaactctgtctcaaaaaataattaaaattaaaaaaattaaaaaaaataaaatcgtaagaggaaaacatttggcacaggcggtaggcaggatgggctgctgacccagtaggctgacaagcccaggatgttataatccctgtaacatccttgcagttgttctcaacctgttgagtgctgtctgtattacctcatctaatccttacagccgtcggagattaacccattttaactactatcatcccctgtaagaggtgaggcccagagaggttgagtgacttgcccagggtcacacagctgccaagcagggcgtagccaggatttgaaccagggaagcctgactgtatcacgccctggatggggaacttggggatgagcaagacccggaaggagcgagatccgggagggagactcagcccagacaggaggcgttagcaggcgctctgcggttccaggcgtttccttgcattccctgcgtgctgggctacggagagtgtcaaggccagagaagccacgccggcctttggacctggggcgcctcgggcagccaaggagagctgcggtggccgctcctccccgcgctctgatctcgggagtccctggcgccggcaccttctgatctctgcctcttattgacggggagggcgaggaggggccagctctggttttacaaccccggccccaccttccttagggagggctgagccacatgaatgattttatgg[132 bp omitted]gcaacagccgcctccggggttcaagcgattctcctgcctcagcctcctgagtagctgggactacaggcgtgcgccaccacgcctggctaaatttttgtatttttagttgagacagggtttcaccatataggtcaggcttgtctcaaactcctgacctcggatgatccacccgcctcgtcctcccaaagtgctgggattacaggtgtgagccaccgcgactggcctgaagctgctttttctgagacgggctgatcaaggggtttcaaacaattaagaaataataaggcattgcctccccgctgggtgagatttgggcaggcagactagggagaggggcttcggggccagcactagcggatgcggggacttggggagaagtggaaaaagatgctcacggttccctccttctccacccagcccctgacgagggactcagccttgaagagtgagggacaggatgcgttttcctttccactcgctctttggggtggggggaggcagttgtgcctggtgggcctgtgtacggactggcagaggaaaggttggaagtggtgatgttcagagttcaggacccatttggttttgttttttgttttgttttgttttgttttgttttgttttgttttggagacagagtcttgctctgtcgcccaggctggagagcagtggcgtgattttagctcactgcaacctccgcctcctgggttcaagcgattctcctgcctcagcttcccaagtagctgggattacaggcatgtgccaccatgcctagctaatttttgtatttttgataaagacagggtttcgccatgctggccagctgagttcaggacccatttggaaagaactaagcagcccagtttgccacccagagggtctggaggaggaactgtgggacccagtgggtcacccatgacatggaataaatgccaggctgagaagggagaccctcgccttgcccggaggcctggagtggaggccctaagagaggtgtggccagttacttacgtggggaccagagccccaaggatctgggaaagtggggaccgtgacaccgcaggcaagaaagcctgcaggggccaggtgccacagctcacgcctgtaatcccaacactttgggagggcaaggcaggaggattgcttgaggccaggagttcaagaccagcctgggcaacatagcaaaccctcatctctctttaaaaaaaaaaaaaaaaaattaaaaagaaaagaagaatgcccacaggaaggcagtcctgggttcgaatgccgcccctatggctcaggagctgggaccctcctggtagaaaggactgccctcagggttgagcgtctgtgaaacgggcaatgaccggggaagggcctgacctgggctcgcagctgactcagcatttgtgctgtttctctctttcctccttccccagttctgagaccgctgctgagccagaaactcgaatgctagcaagggaggggatgggtgaggaatgataataatgatgagcttcctgagcatctgccctgagccaggccctgtgctgaaggctgtgtggggatgagctcactgagtcttcacaacagccctgtgtggtcccagtgttacaatgcccattttacagatgggaaaactgaggccccactcataaccctcatgccagagaaaggaatccaacaggggcttggaactgcagtcagaggctgcccctcagtggccatttcttctcggggggacttgtcacccttatggtttccatgaccctggccaccctccatagatatataccgtgagcccataggaaaacattttctcgtagccacctttttaaaaaaacaaaagaaacaagtgaaattaattttaatcacatatctaatctatctgaaatatcatttccacatatagtcaatttcaaaaactgtcaatgaggctgggcgtggtggctcatgcctataatcccagcactttgggaagccgagacgtgtggatcccttgaggtcaggagttcgagaccagcctggccaacatggtgaaaccccatctctagtaaatatacagaaattaggacagccgtggtggctcacatctgtaatcccagcactttgggaggccgaggtgggcctatcatttgaacccgggaggcagaggctgcagtgagctaagatcctgccattgcactccagcctgggcaacaagagcaaaactccgtctcaaaaataaaaaaaataaaaattagccaggtgtggtggtgggcgcccgtaatcccagctactcgggaggctgaggcaggaggattgtttgaacccaggagacggaggttgctgtggggctgagatcgcaccactgcactccagcctgggagacagagcaagatcttgtctcaaaaaaataaattcgggcccggtgtggtggctcatgcctgtaatcccagcattttgggaggccgagacaggcggatcacctgaggtggggagttccagaccagcctgaccaacatggagaaaccccgtcctactaaaaatagaagagtagctggtcgtggtggcacatgcctgtaatcccagctactctgcgaggctgaggcaggagactcgcttgaacccgggaggcagaggttgcagtgagccgagatcgtgccattgcactccagcctgggcaacaagagtgaaacactgtctcaaaataaataaataaatagatagataaaataaataaattaattaagataaaataaataaataataaaggtatgctggaagggagagagagaggaggtgtttgagagaaaggaggagagaaaaaaagtgaagagccccaggcgacaggcgtcgtgcagggtgcggttccacggtgtagtggagcatgcgacattcagggaacaagccaaactggacagtgagaacggaacactggcagcccagctacagtgggactcggatgggcagggcctgcggtgagactgtcaggcttcaagggacagagccagggacctcgaacctaacgtgtgttccccatcaggcagatgtgggtgagatgctctacatcccagagccccactcccctcttctccaaaatgggccttggctgggtgcagtggctcatgcctgtaatcacagcactttgggaggctgaggcaggtggatcacctgaggtcgggagttcaagaccagcctggtcaacatggcaaaaaccccatgtctactaaaaacacaataattagccgggctcattgctcacgcctgcaatcccagaactttgggaggccaaggcaggaggatcacttgagatcaggagttttgagatcagcctgaccaacatggcgaaaccctgtctctactaaaaatacaaaaattaggtcaggtgtggtggcttatgcctgtaatcccaacactttgggaggctgaggcgggcggatcacctgaggttaggagttcaaggccagcctggctaacatggtaaaaccccgtttctactaaaaatacaaaaaattagccaggcgtggtggcacatgcctgtaatcccagctactcgggtggctgaggcagaagaatcacttgaaccctggaggtggaggttgcagtgagctgagatggccattgcactccagcctgggcaacaagagcgaaactctgtctcaaaaaaaaaaaaaaattagcaaagcgtggtggtgtacacctgtaatcccagctactggggagggtgaggcaggagaattgcttgaaccccgggaggtaggggttgcagtgagccgagatcacaccattgtactgcagcctgggtgaaggagtgagactatgtctcaaaataaatacataaatagaaataaaaaatcatatgcatgtttatatggatttttattattattattttatttatagatcatagttttacttgttttgaggatatatgcaatatttatatagactttatttatttatttattttttgagacagagtctcacttcctcacccaatccagagtgcagtggcgcgatctcagctcattgcaaccactgcctcccaggttcaggcaattctcttgcctcagcctcccaagtagctgggattacaggcatgtaccaccatacccagctaatttttgtatttttagtagagatggggtttcaccat[138 bp omitted]aaaaaaaaagttaagcgggaactttccctatcagatctttttttaaaatataaaattttattaaaatagattttttgtggagacagggtcttgctatgttgcccaagctgattttgaactcccgggctcaagccattctcccgccttggcttcccaaagtggtaggattacaggggactgagccaccgcacccagcctcctatcggatcttaaaacctactttacagctactacaatgcaaatcatatgatatccactctgtgacctagcaattctgttcctagttatttgcccaagagaaatgagaacgccggttcccacaaagacaggaacaactgtggcagctttgggagtaatagcctgacctggaaaccgccgaggtgtccattaacagaggactggatcaacacattgtgaatttatttatgcagtggaattctactcagccgcaaatgggaacaagctctaatgtatacacagacacggaaaatgtcagaaacattatgctaggcaaaaacaaccaaaacaccaaagaacctcttgtgtaagatgacagttccagaacatgcaagactgggctgatgcaatctgtacggtgggggacgtagaggggtggcctctggggacagggcagggactgattgagacaagatgcaggctggggcgcaggcaccgtggctcacacttgtaatcccagcactttgggaggccgaggtgggtggatcacttgaggccaggagttcaagaccagcctgaccaacatggcgaaaccgcatctctactaaaaatacaaaaattagctgggcgtgttggcacatgcctgtaatcccagctactcgggaggctgaggcaggagaatcgtttgaacatgggaggcaaggttgcagtgagccaagttgatgccattgaactccagcctgggcaacagagacttcctctcaaaaaaaaaaaaaaacaaaagaagaggaagaagaagaagaagactgggctgaggtgggttgatcacgaagtcaggagatcgagaccatcctggccaacatggtgaatccccatctctactaaaatacacacaaaaaatgagccaagcgtggtggcaggtgcctgaagttccagctacttgggaggctgaggcaggggaatcgcttgaacccaggaggtggaggttgcagtgagccgagatagcaccactgcactccagcctggcgacagagcaagactctgtctcaaaaaataaaaataacaataaaaaataggtcgggtgcagtggctcacgcctgaaaccccagcactttgggaggccgaggcgggcggatcacgaggtccaaagatcgagaccagcctggctaacacggtgaaaccctgtctctactaaaaatacaaaaaattagctgggcgtggtggcaggtgcctgtagtcccagctacttgggaggctgaggaaggagaatcgcttgaacccaggaggcaaggttgcagtgagccgagatcacaccactgcactccagcctgggcaacagagcgagactccgtctcaaaaaaaaaaaaaaaaaaaaaaaagaaagaaaaaaagaggaacttacaagaacaatggaaagattaccccatgaacacccctatgcccaccaccactaaaatttggggttttttaaatttttaaaatttttttcttttttacagtgtccctttcaggatacacttaaattttattatatagtacttgttttatcacagatctttgcatccctctagccatctatcaatccttctgggtttgttgttgttgttgttttgagatggggtttcactctgttgcccaggctacagtgcaatggcttgatcttggctcactgcaacctctgccccccaggttcaagcgattcttctgcctcagcctcccgagtagctgggactacaggtgcgtgccaccacgcccggctaatttttgtatttttagtacagattgtgtttcactatattggtcaggctggtcttgaatgcctggactgatgatacacctgcctcagcctcccaaagtgctgggattacaggaataagccactgagcccagcctaatttttgttttttttagtagagacagggtttcgccatgttagacgggctggtctcaaacacctgacctcagatgacccgcctccgtaggcctcccaaagagctgggattacaggcatgagtcacggtgcccggcctaatccttacttttgatgcatttcaaagtaagttacagacatctgaatgtttcaccctaaacattccaggctgcatattattaactacttcagtatttgtttatgggggggtgtgtgtgtgtgtgtttgtgtgtatgtgtgagagagagagacagagagatggagagagagagagatggaatctccctctgtcacctaggctgaagtgcaatggctagatcttggctcactgcaacctccacctcccagattcaagcgattctcctgcctcagcctcccgagtagctgggattacaggtgtgcaccactacgcccggctaatttttgtatttttagtagagatggggtttcaccatgttggccaggctagtctcaaactcctgacctctggtgatctgcctgcctcggccttccaaagtgctgagattacagatgtgagccactgcacctagctagtggttttgtttgtttgtttgttttaatagaagtttacctacagtaaaccacacaaatctaaagtgtgctagttttttgtttgtttgtttgtttgtttttgagacaggatcttgccctgtcacctaagtggtacaaccacagttcactgaagcctcgacctccccagctcaggcaatccttccacctcagcctcccaagtagctgagaagacaggcacatgccaccacaccaggctattttttttttttttagacggagtctcactctgttacccaggctggagtgcaatggcatggtcttggctcactgcaacctccgcctcctgggttcaagtgattctcccacctcagcctcccaagtagctgggactacaggcgcacaccaccacacccagctattttcgtatttttagtagagacggggtttcactctgttggccaggctggtctcaaactcctggtgtcgaactcctgacctggtgatctgcctgccttggcctcccaaagtgctgggttacaggtgtgagccaccgcacctagcctaaatattttattgttatttgtagagacggagtctcactatgttgtctaggctggtctcaaactcctaggctcaagtgatcttcccactttgcttcccattttgggaggatttgggctcccaaaatgctgggatcacaggcacgagccaccgcacccaggctaaagtgtgctcattttgagaaatatatgtacggctgggcacaatggctcatgcctgtaaagccagcactttgggaggccaaggctggtgggttgcttgaggccaggagttcgagaccatcctggccaaaatggcaaaaccccatcattactaaaaatacaaaaattcgagggatgtgccaggcgtggtggctcacacctgtaattctagcattttgggagactgaggcgggtggattgcttgagctcgggagttccagaccagcctgggcaacatggtaaaaccccgtttttactaaaatataaaaaattagctgggcgtggcagtgtgctcctgtaatcccagctagtcaggaggctgagatgggagaatcacttgaacccgggaggcagaggttgcagtgagccaaaattgtgtcactgcactccggctttggtgacacagtgagactctgtcaaaaaaaaaaaaaattagagggacgtgttggcacacacctgtaatcccagcttcttgggaagttgagacatgagaatcacttgaacctgggaggtgctagttgcagtgagccgtgattgtgtcactgcactccaacctgggcgatagagcaagactctgttttaaaaaaaaagagagggagagggagagatgcagagatgcatgtataacccaagtccctgtcaagatgtaaactccttttgagtggctgaattccagcgtttttccaggtccagactcatttaccccgtcccctgttgtttctggcctctcttggaacatcattgccatgatcgccctgggatatatttcactgcgcgcttcctcaagggcatctgtctattccttatgtttctagggggtcaggttcattcggggatctggcaaatagaacacagtatttaaccaggcacggtggctcacacttgtaatcccagcactttgggaggctgaggcgggcagatcacgaggtcaggagtttgagaccagcctgaccaacatggagaaatcccgtctctactaaaaatacaaaaattagccaggcgtggtggtgcacgcctgtaatctcagctactcaggagtctgaggca[131 bp omitted]gaaggtaggaaggacatagcacagggaaaaattctgccacttcccagctctcctgctagtgaggaaggcagatttaaagaaggcaacagaccaggtgcggtggctcacgcctgtaaccccagcactctgggaggctgaagtgggagggtcgcttgagctgaggagttcaagaccaacctgagcaatgtggtgagactctatctctacaaaaaatgtaaacattagccaggtgtggtggtgtatgcctgtagtcccagctactcaggaggctaggctgaggcaggaaaatcacttgagcctaggagactgaggctgcagtaagctgtgaccgcatcactgcactccagcctgagcaacagagcaaggccctgtatccaaaaaataaaaataagcagggcacggtggcttatgcctgtaatcccagcactttgggaggccaaggcaggagaatcccacgagcccaggagttcaagaccagtctgggcaacatagcgagacccctgtctctacaaaaaatttaagaattagctgagtgtggtggcacacacctgtagtcccagctactggggaaactgaggtgggaggatcgtttgagcccaggagccggagggtggaggtcgagggtgcagtgagccaagatcaagccactgcattccagcctgtgcaacagagtgagactccatctcaaaaaaaaaaaaaaaaagtattaaaaagggccgcaaaggaggccagcaggatgcggagatgggcagtaatgtgcacggggtgggaggtctcttgctttagccaaggtggtcagggaagacccaagccctgaagacagagaaggagctggccttgaatcctgtaaatgttcccaaacgatctccctaagaggttatgccagtcacactcctgccaagagagtatctctgcgccacggccaagggtgagtcatcctgctgagaggttgagctggggacgcctgcccagatgggctccaagtgagggagagcctggcggggagaacagcccggacagaggcagggcagggcgccgggacactgcttggcgcgtcctgggagtgaagcgcattgaacccagctcaggctggtggtgggggagtcttggcaatgctctctctccaaaggcgagttgatcacagacgctggcagtgagtcagcggcaccgccagggctgctgagaaatccctcctgctgtccgatcgcattcctggaagggtgggccgctcagggccccccagctccagtcccactcaggccccagaatcccagcagcccaccactcacttctttgcgctcactcttccttctggtccccacacaccgctccctctctcgctaccttcagtctttgctcagatgtcgagttcccagaggggcctccctgacgccaccgttctagcagcatttagcatttagataaatgacaaattttagattaaatgttagataaattttaggctgggcgtggtggctcacgcctgtaatcccagcactttaggaggctgaggcaggcagatcacaaggtcaggagatcgagaccatcctgggtaacatggtgaaaccctgtctctactaaaaatacaaaaaattagcagggcgtggtggcgggcgcctgtagtcccagctactcaggaggc[136 bp omitted]atatatatatatatatatatatgataaattttagataaatttttatctaaaattgtaactcactggattcagtgacatctatctgtaatcccagcactttaggaggctgaggtgggaggatcgcttgagcccaggagttttctttcttttttttcttattttttaaagagattgggttctcactctgtgtagcccaggctggtcttgaactcctggcctcaagcagtcctcccatctaggcctcccaaagtgttgggattacaggcatgagccaccatgcctggcctcaagattggttttttgttctgagacacagactcactctgtcacccaggctggagtgcagtgacatgatcccagctcaccatgacctccgcctcccaggttaaagtgattctcctgcctcaggctcctgagtagctgggattataagcatgcgccaccacgcctggctaattttgtatttttagtagagatggggtttcgccatgttgccgaggctggtctcaaactcctgatgtcaagtgatccacctgtctcggcttcctaaagtgctgggattagaggcatgagccacctcgtcaagattgttaatcacatctgcaaagtccgtttggccatttgtggaacacagtctcagatttcaaggattaggacgacaacatcattggaggctgtgatttggccaaccacagtcacagagatggaattacacagagtttaccttccaagtctggctctttcactcagtgcaatgcctgggagagccttccctgtggctgtgggaaccgccggtttgttctttttttttttttttctgaggcggagtttcactcttgttgcccaggctggagtgcaatggcgcgatctgggctcactgcaacctccacctcccaggttcaagtgattctcctgcctcagcctcccaaaaagctgggattacaggcgtgcaccaccatacccagctaatttttgtattttattagagacggggtttcgccatgttggccaggctggtctcaaactcctgacctcaggtgatttgcctgcgtcagcctcccaaagtactgggattacaggcgtgagccaccgagcccggccagttctttttcatcgctgagtagtatcgcatggcacagaatactgctgtttatccacttacccatgcaaggacgtttgagctgttcccagggtttggcaattatgagtacagtggctataaacatgagtgtagatgagggtcaagtgtagatgttggtttgaacatataggcttccatttctcttggacaaacacccagaagggagagtgactctggtttttgctggtttttgttttccgtttttgtttttgttttttttttctgagacagagtctcactctgttccccaggctggagtgcagtggcgcgatctcggctcactgcaacctctgcctcccaggttcaagattctcctgcctg[168 bp omitted]gccaccacacctggcctattattatttttagagatgaggtcttgctttgtcacccaggctggagcacgcagtggtgagatcatagctccctgtagccttgaactctgggctcaagtgatcttcccacctcagcttcctgagcagctgtgactacaggtacaggccaccatgcctggctaatttatttatttatttatttatttattttgagatggagtttcgctctgtccccaggctggagtgcagtgatgtgatctcaggacactgcaacctctgcctcccgggttcaagcgattctcctgcctcagcctcccgagtagctgagattacaggcgcccaccaccgtgcccagctaatttttgtatttttagtagagatggggtttcaccatgttggccaggctggtcttgaactcctgacctcaggtgatccgcccacctcagcctcccaaagtgctgggattacaggcttgagccacagtgcccagcctgcccaggctggtcttgaattcctggcttcaagcgatcctcctgcctgggtccttcaataaatattgacaagcacctccctgctgccaggctctgctgagagtactttaggtacattggcaaacaagacagaacaataacaaaagaaaaaaacaccagatttttttaaattcccaggctcatggagcttacatgcaagcggagaagatggtcaataaaccatcaatgtcatatgtcaactgtagagtagctcaggagtgagtgacaggtgtgatggtaggcagagcaggggaagagggtgcagggggtctagctgtaaacaggatgctgtagggtagccctcatgataaggggtgacatttggaacaaagacttgaaaaaggtgaggacaagaggcatgaggcaccatgcccggctgcacttgtgtttaatgaaaactatgatggctgctgtgtgaccttaggggactatattaacctctctgggcctccatttcttggagcatgaagtggtcctttcactactcacttcctgaggttctgggagaagtctaggatcatgcatgttcttggcatagagtttctgtacgggtggctcccctcctggtgccaggccctttcctgggattggagggggatggacagagggaattcagaggtttaaggaggctgtggccccatctcctggggcaaggaggctattggtct[132 bp omitted]aaacctcgtctctactaaaaatacaaaaattagccaggcatggtggcatgcacctgtagtgctagctactagggaggctgaggcaggagaatagcttgaacccaggaaggcggaggttgcagtgagctgagatcacaccactacactatagcctgggcaacagagcaagactccatctcaaaaaaaattaaaaaaaagagggtgatatctgacctgtgtcgaggtggaaggaggagatgggaaaggcactcagagagtggaaaatgggcgtgcctggagctggtgtctgcagcaaggaggccagaggaggaggcactggcctaggctttgacctgagggcactgaggtgccacaggagggctgggagcagaggaggggcagcggagaagacctggaggaggctgagtcgagggcccacagggagaggagaaggcctgaggtgggcaggaatgcagggacagagaaggaaccaggacccagtagtccatggaggagggaggcaggagggctgggaagttgggcctttaagagttgcatgtctgctgggcacggtggctcatgcctggaattccagcactttgggaggctgaggcaggcagatcacctgaggtcaggagtttgagaccagcctggccaacatggtgaaaccctatgtctactaaaaatacaaaaatcagttgggcgtgacgacaggcacctgtagtcccagctaatcaggagtctgaggcaggagaatcgcttgaacttggaaggcggaggttgcagtgagccgagatcgtgtcactgtactccagcctggtgacagagcaggactccatctcaaaaaaaaaaaaaaaaaaatttacatgtccagggggcttgcaggcagaaccattcaccctccaggaggctgagtcattcccggggatcacctgcctgctgtggccacccacccggaggagctctgtctgctgtccctgtccctggcctctcgctggcttaattgtccctttcattcctccactcaaatcgagcgatatcagcacgccaggccctggacgtgttttgtgggaacaaacaggcctgtttgtctacgtcccaggcgtagagaagttcgtcccggggccagatttgttttacaaggtggacagcaggcacagggtacctgttttaggaatgcgagaatgcagccacgtaggcatgtgggtgggggacaggggggtcctggctctgcgctcaggcccagagagtggcagggtcgggggacatttccaggagcgggaacagcagctccaggggcccagaggtaggactactgctcggtgcatttggaggtcttggctggactgtggcgttcatggggaaggagggactgagtctacagggctgagaggccaccacagcttgggttcaaatcccagctctgttcagctcttgtgtggccacagtcaaatcgcttccctccttgaagctccatgtcctctctgtagcaatggaagctacagcggagcccaattctaccccacccactgcacgacaattggtttgtttctatgtttgttactagagtcagggtctcactctgtcacccaggctggagtgcagtggcgcaatctcagctcactgcagcctcaaactcctggctcaattgatcctcccgcctcagactcccaagtagctgggactacacgtgtatgctaccacagtcggctaattttttatttttaaacagagacagtgttctcgctatgttgctcatgctggtctcgaactcctggcctcaagtaatcctcctgtcttggcctcccaaagtgctgggactacaggtgcaagccactgcgcccagcccttgaggagttttcaaagtatccacagcacccaaggctgagaactgctacagcagctgaaagccataagtgtctttgactttccttttgtcctggtaaaccccttcattccttccttccttccttcctacactcattcaatcaaacactggttgaacaccaacaagtcccagcactgtgggctccaccctggcctctggggagtgggggagggacccccgatttggagattgtaggtgccaagaggaacgggcaagatgccctcctattcattcatttattccttcagggcctctccaagggcacagggtcttttcttgttggcatctgggttttcctctcctgtaagctgggaaggagatttctccctcaaggagctgttggccagatcaaagactaaaataatgctaaacagagcttccgtttcctgataaatgtatcaggagccaagcacttaaaatatattatcccgttgaatccccaagtaggattaaaacctcaaagcagagattgctcttatcctcacatgacagatgaggaaactgaggatcaaagaagtgaagtccgctgcccaaggcacagaaaggacaagtaggacctatggaagcccagccaaggcccagcaggcgctcagtggctaatcctcctgaaaactaattacctcactgcgcctgcccactggactaaatttgcctggtaaccgatgacatcatcactaattccgcgcccacgctcaacctatgggataactgatgacatcactgaacaaacaaagtaactgcagtttattgaaggcctactgtgtgcgcaaggctgtgctaggcaggcctcctctgagttcacataaggccccgtggtgcctgctactgcatgaaatagccataataattt[146 bp omitted]tcttggattcaagcaattatcctgcctcagcctcccgagtagctgggattgcaggtgcccaccaccacacctggctaatttttgtttttgtttttgagatgaagtctcactctgttgcccaagctggagtgcagtggcgcgatctcagctcactgaaacctccacctcctgacctcgtgatccacccgccttgacctcccaaagtgctgggacaacaggtgtgagccaccgcgcctgggatctttattaactttttaaaattaaaaatatatatatatatatatttatatatattttgagatggagtttcactcttgtcgcccaaactggagtgcaatggtgccgtgatctcggctcactgcaacctccgcctcctgggttcaaacgattctcctgcctcagcctccggagtaactgggagtacaggcatgcgccaccacgcctggctgatttttgtctttttagtaggggcggggtttcaccatgttggccaggctggtctcaaactcctgacctcaggtgatccacccacctctgtctcccaaagtgctgggattacaggagtgtgccactgcgcctgaccagctttataaagtttatagggacagtgtcaccactttacagaagagggactgaggctctgaggaggaagttccttgccagggtccgagtgtcgccaccctgagaactccagcacccacctccctactctccctcatggcgtctcccccacctttccacagccagaagttgccaggtgaatacttccggtacaagggcgtccccttccccgtcggcctgtactcgctcgagagcatcagcttggcggagaacacccaagatgtgcgggacgacgacatctttatcatcacctaccccaagtcaggtacctgccgggctgcgggcgtcgggggctggggagagtggggagggggtgcggcagaggacaggaaaggcacatagagaaggaggggaggaggaaaagtggggccgggtctgttcagagcggtgcccctgccagaagtagcctcccagggatacccacccggtgcccagcctctcccctccaggtcagttctcaacacttcaccttccctgacctccctggctgaaatagcgtcctcgttctgttcctccctttcccctttaccctctacttctcttttttttttttttttttgtagagatggggtctcgctac[132 bp omitted]tctgtcactcaggctggggtgcagtggtgcaatatcagctcatcaaacctcccaccttggcctcccaaagtgctgggactacaggtgctggtcaccaccaaattgtatactttttttttttttttttttttggaggtcttgctctgctgcccaggcttcagtgtgatggtacaatctcggctcatttcagccttgacctcctggactcacatgatccgcccaacctcagcctcctgagtagctggaaccacacgtgtgcaccaccatgcctggctaacttttgtgttttttgtagggacagggtttcatcatgttgcccaggctggtcttgaactcctgggctcaagcgatcttcctgcctcagcctcccaaagtgctgggattacaggcatgagccaccgcgcctggctaaattgtatactttaaagtggtgaattacacacaatttgagtgtttgagtttgagaccaacctgggcaaaatggcaaacccccctctatttttttttttttttttttttttttgtgacggagtctctctgtcgcccaggctggagtatagtggcatgatctcagctcactgtaacctctgcctcctgggttcaagcaattctctgcctcagcctcctgagtagctgggatcacaggtgcccgccaccatgcgcggctacttctttttattttattttattttatttttgtatttttagtagagacagggtttcaccatcttggccaggctggtcttgaactcctgacctcatgatccaccagccttggcctcccaaagtgttgggattacaggtgtgagccactgagccgtcttttttttttttttttttttttttttttttagagacagagtcttgctctgttgcccgggctggagtgcagtggcgtgatctcggctcactgcaatctctgcctcctgggttcaagcgattctcctgcctcagcctcctgagtagctgggattacaggcgtgtgccactacacccagctaatttttgtatttttagtagagatgaggtttcaccgtactggccaggatggtcttgatctcttgacctcttgatctgcccacctcggcctcccaaagtgctgcgattacaggtgtgagcccggtcaataagtagcatttaaatgaccaaagggaaataacaaaaactcttccttcccttttttctcctctcttccccacctcctccaacaagtatttattaaacacatattatgtgccaggcagtgttctaagtacaaagaaggctgcaactctccagacagactgaaatgtctccctttatggagctcacattgtactggggcaacccagaaaataaatcaacaaataaaaatatgacactatgattggtggcaataaatgctgtgaagaaaagtagagggtaggcggggcatagtggctcatgcctgtaatctcagcactttgggaggctgaagtaggaggatcacttgaggccaagagttcaagcccagcctgggcaacatagcaagaccccatctctaaaaaaaaaaaattagccaggcgtggtggtgtgcgcctgtagtcccagccacttgggaggctgaggcaggaggatcactttagctagagaggtcgaggctccagtgagctgcgatcacaccactgcacttcagcctgggcaacagagtgagaccctgtctcaacaaatagaaaaaggtacaattcaatgactttgccatgtgcgtggagctggtcatccatcaccacaatcaattttagaatattttcagccgagcacagtggctcacacccataatcccaacattttgggaggccgaggcaggaggatctcttgagcctaggcgttcgagagcagcctggccaacatggtgagacctcatctctacaaaacatacaaaaattagccaggcacgatagtgtatgcctgtagttccagctacttgggaggctgagatgcgaggattgcttcagtctgggaggtggaggttgcagtgagacgcgttcaccccaccgcactccagcttgggtggcagagactgtctcaaaaacaaaaaactgagtgggccaggcacggtggctcatgcctgcaatcccagcagtttgggaggctgaggcgggtggatcatttgaggtcaggagttcgagaccagtctggccaacatggtgaaaccccgtgtctactaaaaatgcaaaaactatccaggcgtggtggtgcgtgcctgtaatcccagtattcggcaggctgaggcaggagaattgcttggaaccggggggtagaggttgcagtgagccaagagtgcaccactgaactccagccttggcgatagggcaagaccctgtctcaaaaaccaaaaacaaataaaaataaaaataaagaacattatcatcatccaacaagaaactctggacctataagccatcacctcccaatcctcatatcccctcccccctgggccctggtaaccaccaatctccgttctgtttctatggatttttctattttgggcatttcatggaaatggaatctacactatgtggcctcttgtgtctggtttcttcctgagcatcacgttgtcaaggttcaaccacattgtagcatgtgtcagagtctcattcatttttatggtccaataatattttatgttatgtataaactatattttatttattcatcagttgataagcatttggattatttccactctggggcttattatgaatgaa[138 bp omitted]gcctc[134 bp omitted]ggcctcccaaagtgctgggattacaggcacgagccaccgcgcccggcctttttcttttcttttctttctttcttttttttttttttttttgagacgaagtctcgctcttgtcccccaggctggaatgcaatggcgcagtctcggctcactgcaacctctgcctcctaggttcaagcgattctcctgcctc[134 bp omitted]cagcttcccgaagtgctgggattacaggcgtgagccactgctctcggccttgcatgcaagttcttgtttctatttttattttttgaggcagggtctcgatctttcgctcaggctggagtgcagtggtgcagtctcagctcactgcagccttgacctcctgggctcaagctatcctcccacctgagcctcctgagtagctgggacgacaagtgcacaccaccacgcccagctaattaaaaaaactttttttttttttcacagacgagatctcactgtgttgcccagactggtttcaaactcccgagctcaagcaattctccctccttggcctcccaaagtgttaggattataggagtgagcctctgcactgggccctgcacacaagttcttacgtggacatatgttttctttgttttttatggagacaggttctcactgttgcccaggctggagtgcagtggcgagatctctgttcactgcaacctctgcctccacaggttcaaacaattctcctgcctc[134 bp omitted]cagcctcccaaagtgctgggattataggcgtgagccaccgtgccagcccgaagtggctttatcttttttcattcttcccagcaatagatgatcctctattgccccacatcttctccagtgattagcatcaacagagatttacttattggagacaaggtcttgctcggttgcccaggctgaagtgtagtgggaagatcatggctcactgcaacctcgaactcctgggcacaagtgatgctcccaccccagcctccctaatagccaccacacccagctaatttttgtagcgataagggtctctggttggtctcgaatgcctgggctcaagcgatcttcctgcctcagcctcccaaagtgctgggattacaggcatgagccactgtgcctggccagtttttttctaaagctattttgataggtgcctactggtgtttcactgtagtattaatttgcatttccctaacagctaatggtgtttgagcatcttttcatgtgctcattagccatcatatatattccttttttttttttttttttttttttgagatggagtttcactcttatttcccaggctggagtgcaatggcgcgatctcagctcactgtaacctccacctcccaggttcaagtgattctcctgcctcagcctccctagtagctgggattacaggcatgtgccaccatgcctggtttttgcattttttttttttttttagtagatcgggggtttctc[131 bp omitted]gccactgacttgaagctcacaaatgtattatttggtaaagtgttgaaat[137 bp omitted]ccattctcctgcctc[223 bp omitted]tacttgttttgcaaatattttctcccaatctatggcttgtcttttcattttcatatcagcgtcttctcagagtatgttttattattattattatattattattattattattattattattattagagatgaagtctcgctctgtcgcccaggctggagtgtagtggtgccatcttggcttactgcaacctccgcctcctgggttcaagcgattctcctgcctcaacctcccgagtagctgggattacaggtgcccgccaccatgcctggctaatttttgaattattagtagagacggggttttgccatgtgggccaggctggtctcgaacccctgacctcaggagatccacctgcctcggcctcccaaagtgcagggattacaggcgtgagccactgtgaccagccttgattttgcttatgtttttctttctccttataccttgacattgtcccatcttggaactttaaacaaataagtttctggtttttttaaatagttccgtggtatttcataacataggatatacaataattcttgcttaaccagtttcctagtgactgatattaatgttcaatcttttgcctatgtatatacaatgtaaactttaaacacaatgccttgtacatgcagtacttggcattgaacacacttacctctaggacaaatatctggacaaagaattgcttggtcagagtctgtacatttgtaattttgatatgtaatggctacatttccctctatagaaattgtggaagcttgttctctgagccgggggtgtggttaacacctgaaatcccagcactttgggaggtcgaggcaggcggatcacttgaggccagcaataggagaccagactggcctacatgaccccatatctactaaaaatacaaaaattagctgggcatggtggtgcgcgcctgtggtcccaactactcggaaggctgaggcatgagaattgcttgaactggggaggcagaggttgtagtgagccaagatcgtaccaatgcactccagtctgggcaacagagcgagaccctgtctcaaaataaaatgaaaaaagaattatttgcagtcaggcacggtggctcatgcctgtaatcccagcactttgggaggccaaggcaagtggatagcttaagcccaggagttcaagaccagcctgggcaacatggcaaaatcctatctctacaaaaaaaaaaaattagccaggcgtggtcgtgcatgcctgtagtcccagctacttgggaggctgaggcaggagaatcgcttgaaccctggaggtggaggttgcagtgagccgagatcactccattgcactccagcctaggcaacaagagcaaaactctgtctcaaaaataaaaaataaaagaaaaaacagaagaaaataccaagtgtggcaaggatgttgagaaaatggggcccttgtgcactgttggtgagcatgtagaatggtacagctgctatggaaaacagtttggcagttcctcaaaaaattaaagatagaattaccatattaactcagcagttccacttccaggaatatgcccaaaagaactaaatactaggtgggggcactctgacagatatttgtacaccaatgttcatagccacattatttgcaatgaccaaaagctgaaactatccaaatatctgccgttcatgaatgaatggataaacaaattatgctatattcatacaatggaatattattcagctgtaaaaaggaaggaaattcgtccgggtgcagtggctcatgcctgtaatcccagcactctgggaggccgaggcgggcggatcacctgaggtcaggagttcaagaccagcctggccaaaatggccaaaccccgtctctactaaaaatacaaaaattagccgggcctggtggtgcgcgcctgtagtcccagctgcttgggaagctgagg[132 bp omitted]tgtaatcccagcactttgggaggctgaggcaggcagatcacgaggtgaagagattgagatcatcctgaccaacatggtgaaaccctgtctctactaaaaatacaaaaattagctgggcatgctggcgtgcgcctgtagtcacagctattcgggaagctgaggcaggagaatcacttgaacccgggaggtggaggttgcagtgagctgagatcgcgccactgcactccagcctggaaacacagcaagactccgtctcaaacaaacaaaaaacaccacacacaggaatagctaaaatagggtgcagccacttcctctagggctgaagccaaactcccaagaaagaaagaaattgggaagaaggacttccctgcccaaccggctccccacacaagattagagtttcgctgcagaggtatggtcatgacccactgggtgactgagaagttcactgaagtgcaacaggccactgaaatttgctagggggaggggtaaacgtcactgcgtgtctagtgcagggctggcccctgtccatcacaagatcccgctaagaggagctcgtgagaatcaggaagagccccatcctcattcagtgttcctccagcgccctctgctgacaaggtttaacactgagctagctggcagaggagaaatgtttacagggtccagctccaatatcacaaaaacggcagagaggcatgaagttggagccaccagcctgtaaactgataactggtacaaggtggttgttagaatgaaatccagtgaatggattggatgtggtggcttacgcctgtaatcccagcactttgggaggccaaggcaggaggatcgctagaggccaggagctccagaccagcctgggcaacacagtgagaccccatctctacaaaaattttaaaaattaggtgggcgcaggctgggcatggtggctcatgcctataatcccagcactttgggaggccaaggcaggtggatcacctgaggtcaggagtttgagaccaacctggccaacatggcaaaaccccatctctactaaaaatacaaaaactagccaggcgtggtggcacacttctagtcccagctacttgggaggctgaggcaggagaattgcttgaatccaggaggcagaggtttcagtgagccgagatagagccactgcactccagcctgggcaacagagtgagactccttctcaaaaaaaaaaaaaaaaaaaaaaaagctgggtacatgtggtctagctactccagaggctgaggtgggaggatcacttgagcctgggagttggaggctgaagctgaagtaagctgtgactgcaacagtgcacaccagcccaggtcacagagcggaatcctgtctcaaaaagaattaaatgcaatgaatactaacagaaagtaattttgaacgtaattgtttctcttctgaacagcctgtggtctcctgaaattcaaaactgtgaattgggtccttgatgaggtccctttccactaggtaacattctgtggctccccacagaaataaagaggtgaacctcagccgggcgcagtggcttactcctgtaatcccagcactttgggaggctgaggcaggtggatcactggaggtcaagagttcgagaccagcctggctaacatggtgaaatcccatctctactaaaaataccaaaaattagccaggcgtggtggtgcatgcctgtaaccccagctactagggaggctgaggcaggagaatcacttgaaaccgggaggcggaggttgcagtgagccaagatcgcgccattgcactccagcttgggcaacaagagcaaaactccgtctcaaaaagaaaaaaagtgggggtaggggggagggatagcattaggagatatacctaatgttaaatgatgagttaatgggtgcagcacaccaacatggcacatgtatacatatgtaactaacctgcacgttgtgcacatgtaccctaaaacttaaagtataataaaaaaaggggtgaccctcaaaagtgggcagtgaaaagtgaaaagagcagagatttttatgtccagacacctgggttcaattccagctttctccatgtattaaaggagtgcctgctgggcatgatgcctctgctcccagcaccttgggaggctgaggcaggaggattgcttgagcccaggagttcaagaccagcctgggcaacatagtgggaccgtatgtcttctaaaaataaaaataagaaattagccaggtgtggttgtgtgcacctgtggtctcagctactcgggaggctgaggcaggaggatctcttaagcccgggatttcaaggctgcagtgagctgtgatcacaccactgcactccagcctgggtgacagagcaagattctgtccccaaaaaaataaataagtaaagcaattctggctgtactaatagatcagcctcagaatttcagcggctgaagccaagtttgtttctttttcctataaactgtagttggtgcaggaagggtggaaggaagttggtggggggatatccatgcattcccagacatttggttccttccatcttatggctctgccatccccgggagtcccagattctcccctggagtctctgtatccagaagcagagagggagtggagagtcacgtggcgtgcgtttatgggccaggcctggaaatagccgcacatcacatcgccgccacctatacttccttggccagacccagtctcttggccccacacatagcagcaggggagaagagaaaaggtcatcacgccatattcccagcagaaaaatgaaatggggttgggtggacagctcaccagtctctgccctgcaccactttcctagctttgtccccttggacgagcgacatggtttctgtaaggctcagtttctggctccgaaaatgaggttaagcaaccttgccttctctgccagctgtaaggaatcagtgtgataaaataggtggtaaattgctcaataaatgctgtcaggcagggcgtggtggctcacagctgtaatcccagcagtttgggaggccgaggtgggcagagcacctgaggtcaggagttcgagaccagcctggccaacatggggagacctcgtctctactaaaaatacaaaattagccaggcgtggtggtgggcgcttgtaatgctagctactcggctgaggctgaggcaggagaattgcttgagcctgggaggtggaggttgcagtgagccgagatcgcgccattgcactccagcgtgggcaacagagtaagactctgtcttaaaaaaaaataataaaaggtggcaaattgctcaataagtgctgttgtgattattctgatgatatctccctcttcagccctcccacacccaattaatctgctcgatttctcccaacaggcacgacctggatgatcgagatcatctgcttaatcctgaaggaaggggatccatcctggatccgctccgtgcccatctgggagcgggcaccctggtgtgagaccattgtgggtgccttcagcctcccggaccagtacagcccccgcctcatgagctcccatcttcccatccagatcttcaccaaggccttcttcagctccaaggccaaggttgggaggaggggtgtgtgtcagttgggaggggctgcatgggtgtatggggtaatggggggacggagcataactcattgattcattcagcacctatttgttaaacacctactatgtgcctgactctgatctagcacagtggtcaatatacacacagaaatgcctgccctttggcagggagtgatggctcatgcctgtagtcccagcactttgggaggctgaggcgggaggatcactttgggccaggagtttgagaccagcttgggcaacatagtcagaccacatcattacaagaaattttaaaaatcagtcagacgtggtggcacacacttgtagtcccagctacttggaatgctgaggtgggaggatcacttgagcccagcaggtcaaggctgc[191 bp omitted]catggtgaaaccatgtctctactaaaaatacaaaaattagtcggatctggtggtgggtgcctgtaatcccagctactcaggaggctaaggcaggagaattgctggaacctgggaggtggaggttgcagtgagctgagatggcaccactgcactccagcctgggagacagaccaagatttcatctcaaaaaaaaaaaaaaaaattacagccaggcgcagtggctcacgtttgtactcccagcactttgggaagccaaggtgggcagatcacctgaggtcaggagtttgagaccatcctgaccaacatggagaaaacctgtctctactaaaaatacaaagttagctgggcgtggtggcacatgcctgtaatcccagctacttgggaggctgaggcaggagaatcgcttgaacccaggaggcggaggttgtggtgagccgagatcgcgccattgcactccagcctgggcaacaaaagcaaaactccgtctcaaaaaaaaaacccccatatattatactacatattataataatttaatagtattacaatatactttaattatatttaatatttatatgtttaacatataataacataatgcaatataatataatacataaaatgtctgatgggataaatttacattggggggagagggctggagatagagttagaggtgggtgtggggctgcaattataaataaggaggtcaagggggcccccagtgagtaaaaacccgggaggtgatggtgggagccacagaggtttctagaggaagagcatttcaggcaagagggaaaagcaggtgcaaaggccctgaggtgggtgtatctgaggtgcaagagggaggtcggtgtggccggagccaagtgagcaagtggggaaaggagtggagatgaggtccgggtggggaggcaacaggggccaaaatgtgcagggccgcgtgggcccggtgcggacttgagctctgaccgagtgacgaggcagcgcggcagggatcgcagcagaggaggagcccgagcgggcttaggcttcaccggcgccctctggcggtcagatggggaccgactgtcgagagagcagaagccgggaagcccgagaggcggcgctggccggggtccaggggaggggacggtggctggactagggtgatggtcacggaggtattttgaaggtgagaccgggaggatttgctgacagactggatgtgggtgtgagagaaggggatgagtcaagggtgactccaaggtttcggcggaagcaactgtcagggtggggcaactgggaaggggaggagggaggggagcaggcgggggaggaagacacgggctctgcggcggcccatcccacgtccagcagaggctgccggtgggcacagaaatgcacccatcgggatctgaggggagagacttgggctgacacgtccatttgcaattccttggcacatatattctgtaattaatcgaagctccaggactgggtgatatcgccaaggaattgagcgtggacagagcagagagggggggctgcaatcaggaagtccccaagaccaccctcaggctcaacgacttagcaaaactcatagtgttcagcaaagctgctggactcccgggttatagtcaattacaatgaaagcaaacgtgaaaatcaggcaagggggccgggcgcggtggctcacgcctgaaatcccagcactttcagaggccaaggtgagcagttgattgagcccaggagttcaagaccagctgggcaacttagaaacacccatctctacaaaaaagtttaaaaattcgtcacgtgtagtggcatacacctgtagtcccagctacttgggaggctgaggtaggaagatcacttgagcctgggagtttcaggctgcagtgagccatgattgtgccacaggcactccagcctcaaggacagaacaagaccttgtttcttttcttttttctttttctttcttttttctttttttgagacagagtttccctcttgttgcccaggctggagtgcaatggcacgatcttggctcactgcaacctctgcccctctgcctccagggttcaagcgattctcttgcctcagcctcccaaatagctgggattacaggcgcccaccaccatgcccagctaattttttgtattttcagtagagacggggtttcaccatgttgaccaggctggtctcgaacacctgacctcaggtgatccacccgccttagcctcccaaagtgttgggattacaggtgtgagccacagtgcctggccgacaagaccttgtttctaaaaaataagactaggctgggcatggtggctcatgcctgtaatcccagcacttggggaggccgaagcagatggatcacttgaggccgggagtttgagaccagcctggccaacatggtgaaaacccgtctctactaaaaatacaaaaattagccaggcatggtggcacccacctgtagtcccagctactcgggaggctgaggcaggagaattgcttgaacctgggaggcagaggttgcagtgagctgagatcgtgccactgcactccagcctgggagacacagcgagacttcgtctaaaacaaaacaaaacaaaacaaaaaaatccaagggattaggaaatacctctcaggacctaggggcaagggccaggcctttctctgggcagaaaggaatcctctacagcacaggaatcaggaaggagccctggaaagcaccaatgttattacaagacctcacaccagcagccacgtttctctaagtctgttttcatttagtttttggtggatctgggggtgttttgttttgttttttggtttatttgtttttgaggcagggtctcgttctgtcatgtaggctggagtgcagtggtgtgatcacagctcactgcagcctcgacctcccgggctcaagtgatcctcctgccttagcctcccgagtagctgggaccacgggcacgcaccaccacatcagctaatttttgtattctttgtagaatgggggtctcattatgttgtccaggctggtctcaaactcctgggttcaagttatcctcctgtctcgtcctcccaaagtgctgggattacagacatgagccaccgcagctggccaagtgttctttctcagcctccctccctttatgcctttgtcattccctcaagcaatttccagaacctcctgtgtgtggggctctgggctaaggctctaggaacgtgtaagaccttgcctgtcctcaaggggttcctcaatctgtgagtaaccaacatggtaaaaccccatctctactaaacatacaaaaattatcctgatgtggtggcacgctcctgtagtcccagctactcaggaggctgacacaggagaatcgcctgaacccaggaggcagaggttgcaatgagctgagatggcgccactgcactccagcctgggcgaaacagagtcagactccatcgcaaaaaaaaaagagtctgccctgagtccttcctgcttcagggtcagaagagaggggtctccagggcaggaggcctcaggggctggggtcttgcctgtgtctgacgccttctcccctctcctcaccatccgcacacaggtgatctacatgggccgcaacccccgggacgttgtggtctccctctatcattactccaagatcgccgggcagttaaaggacccgggcacacccgaccagttcctgagggacttcctcaaaggcgaaggtggggacagggtaaagcggggcaggaggggtggggaggagccccagaggaccctgatgggcagagggacagaggaggggtaagaaagggagagagacagagacacagggcatcaaaaggggcaatagagacagagagcaggtggccaggagaagagacggagggagagaggctgagagaccgaaagacacaggacaggcaaaggacagaggagacagagacagggagagacacagatacaaaaagactgagagagagggcaacaaaagagacaggggcccggcatggtggctcatgcgtgtaatcccagcactttgggaggc[135 bp omitted]agacaggagaatggcttgaacttgggaggtggagcttgcagtgagccaagatcgtgccactgcactccagcctgggcgacagagtgagactccgtctcaaaaaaaataaaaaataaaaagagataaggaaataaatgcagaaagagagatggagtcagagagagacagggagagacaaggaaacaggaggagacaggcccctggtactaagaaaggcagcgccctttggccacgtgttcctttctctgctgctgtcagagaccctggctttggagggaaatccaggtgtgtggaggcggactggatggacagatagacaaaggccccccaagatgggcaaccaggggagaagcaggttggaagagccccagaacttggtggaaatgtgggggctctgggggagggcatccagctctgggggctggacctgggggtttgtggggcacagctagttagacccatgagccccagtggggctgggggaaccccgccactcagccctcaccccacttgtccctctgcccacagtgcagtttggctcctggttcgaccacattaagggctggcttcggatgaagggcaaagacaacttcctatttatcacctacgaggagctgcagcaggtgagtccccacctcctccaggtgcagcgtcccccccataccctctgctcacaccccacactctccccttcccgagggtctcaggacccctccgcttccccatgcaatgcgccagcccctggggatactgcaggaacagaacagaggccctgagcctgtgagcaagaccacagacaaaatccctaaaccacacagcaggctggcggggcagaggagctgaggagcaaaggcgagtgggaaggaagataaggaatggtcaggggcgagatttaacccaggagggttggccggacacagtggtagtggctcacacctgtaatcctaatgctttgggagcctgaggcgggaggaccccttgagcccaagaggtcaaggccacaatgagctatgatggtgccactgtactccggcctgggcagcagagcaaaaccctgtctcaaaagagagagagaaggccaggtgtggtggttcacacctgtaatcccagcactttgggagcccaaggcaggtggatcacttcaggtcaggagttcaagaccagcctggccaacatggtgaaaccccatctctactaaaaatacaaaaattagccgggcacagtggcacatgcctgtagtcccagctgctcaggaggctaaggcaggagaatggcttgaacctgggaggtggaggttgcagtgggctgagatcacaccactgcactccagcctgggcgacagagcaagaccttgttccaaaaaatagaaagaaaaaagattgaaccacatgaaatgcctgcattcaaccagtttttatttatttttatttattttatttaattaatttatttatttttgagacagagtttcgctcttgtggcccaggatggagtgcaatggcatgatctcggctcaccgcaacctccaactcccacgttcaagcaattctcctgcctcagcctcccaagcagctgggattacaggcatgcgccaccacgcccggctaattttgcatttttagtagagacggggtttctccatgttggtcaggctggtcttgaactcctgacctcaggtgatccacccacctcggcctcccaaagtttttatatttggaccagttatatatttatataactggtcggccccgccaactagtttttattttaagatggtaattttggctgggcacggtggctcacgcctgtaatcccaacactttgggaggccgaggtaggcagatcacctgagctcaggagttccagaccagccttgccaacatggtgaaaccccgtctctgctaaaaatacaaaaaaattaggcggccatggtggcgggcgcctgtagccccagctactcgggaggctgaggcaggagaatcgcttgaacctgggagctggaggttgcggtgagccaagatcgcaccattgcactccagctgggttatagagcaagactctgtctccagaaaaacaaaaacaaaaacaaaaaggtaattttatatggttttcccaaatgttgttattatccctattttatcgacgaggaaactggaggtttgtaacttaagagagggttgataatttgcccagggcacatggctcttgcctgcagactccatgtttattttttcccaacctggtaactttcttttaatggaaagctccagaagaggtgtcggtgctactcctccccctcttttccagcaagcattcttctccaaacccagaactgggccacagagcctaacagcttctgggctgcccctgggtgtgaggcgccgcccacatgttagaatttctgggacacgtcagtggttcaagaaggtaaagagaaggaaggttatgaaaccaggagtgacctggaaaatcggagccatggggttggcggagctgaccagagggctgaccat[133 bp omitted]gaaatcctgtctctattaaaaatacaaaaattagccaggcatggtggtgcatgcctataatcccagcagctactttggaggctgaggcaggagaatcactggaacccaggaggtggaggttgcagtaagctgagatagcaccactgcactccagcctgggtgacagagccaggcttagtctcattgtaatcccagcactttgggaggccgaagtgagcagatcacccgagggtgggagttcgagactaccctgaccaacatggagaaaccctgtctttactaaaaatacaaaattagccaggcgtggtggcacatgcctgtaatcccagctactcgggaagctgaggcaggagaatcgcttgaacccgggaggcagaggttgcggtgagacgagatcatgccattgcactccagcctggacaaaaagagcgaaactccgtctaaaaaaaaaaaggcagaggggcacaggggaggactaagggctccagggacctgagctcctctctggctgtgtggccttggacaagtgtctctccctctctgggcctctgtttaccaattgagataatgacacttcccttgcaaagctgatggtgggatcggcacaaatgtatggggggcttggatcagagcttggtacatagtagacactcagaaaggaaggtgatatttgagctgcagccgtggcaatgggcccttctggaagccccatgccaaggcccagagggaggaatgtgtagggaatggtgagtcccagaaggagagggtgggaaaggtattggaagagctgtgaccagaccacatctgttttttgggtttttttttgttgtttttttttttttttttgagatggagtctcactctgccacccaggctgtagtatagtggtgagatctcggctcactgcaaactccacctcccagttcaaacgattctcctgcctcagtctcccgagcacctgggattacaggtgcccgccaccacacccagctaatttttgtattgttagtagaaacagggttttaccatgttggccagactggtctcgaactcccgacacctgtctcagcctcccaaagtgctgggattacagacatgagccactgcacctgccccacatctgtgcttgaaagccgggtctgggtctgggactgtgtcccagggcactcgggagccacggaagagttgggagccagtgaggagcagggtcagctggggtgtgggggatgagctggagggggatggagactggaggcaggaaggctgtggagcagccggctgctgaggcatggatccaggaaggggaggatgaggcctaagcagttctaggctacagggacacagaggaggggatatggcaaggggaggcaggtggggagggacagggctcatgatggacaggttttgggggtgaggggtacccagagagggaggccaggctcctgggtggatggtggggccatcctgcaatgggggcctgggggaggagcaggtttgagatgtagaccagccaatgcctgtctctaacctgaaggagggtgattccaggtaaggtgatgcactgacctctgcccccggatgtgacctctgccccccactgtgacctctgcccccggctgtgacctctgccccctgctgtgacctctgccccctgctgtgacctctgccccaagcccacctattccctcccacctagagaaccctccaaagacagaaactgcaaaaacccttagaggcgatatagcccaacccctcagtttggagttggggaaactgaggcaaagaggcagcgtccctcaggcagccccaggttaggacccagacatgcggatcccaggttccacgctccttccttggccgagtgccctccctccgctgacccctctcccctgcctgcaggacttacagggctccgtggagcgcatctgtgggttcctgggccgtccgctgggcaaggaggcactgggctccgtcgtggcacactcaaccttcagcgccatgaaggccaacaccatgtccaactacacgctgctgcctcccagcctgctggaccaccgtcgcggggccttcctccggaaaggtgcgggggttctggggttcagagcccactaggccactgcccggctgtgtgacctgggagagttacttaacctctctgggcctcagtttctcacccagctgtaacattgggtgaacagggtcactgtggccccagggttgatcacgcacggggcttagcactgactcagcacacgtgccagccacccgaggcgtccccatccagagaactcccaacgacagcaaaacatccaggagtactgccaacgccaggtttacccgagagagatttagagtcttcatgagtcctcctcgacggccatgttcacggcagaaatactcaagccctgggttacggggcgcaggcggtagcatagttgtttcctcttcctgctgtaacaaaaacaccgcaaactccatgactcaaaacacgtttactcttttttttttttttttttttgaaagagtctcgctctgtcgcccaggctggctggaggttgcagtggcgcgatctcggctcactgcgacctccacctcccaggttcaagtgattctccttcctcagcatccttaagtagctgagactacaggcacctgaaaccatgtcaggttaatttttgtatttttagta[156 bp omitted]ccaggctggagtgcaatggcgcgatctcggctcactgcaacctccgcctcccaggttcaagcaattctcctgcctcagcctcccaagtagctgtgactataggcacccaccaccacgcctggctaattttttgtatttctagtagagacaggttttcaccgtgttagccaggatggtctcgatctcctgaccacccgcctcttcctcccaaagtgctgggattataggtgtgagccactgcgcccggccaagtgaagcatcttctaatctctgaccctcctcccttctatagggacccaggtgatgacactgagcccacccagatacttcagggtcctctccccatctccagatctttagcttaatcctatctgcaaaatcccttttgccacataaggtcacatattcacaggttccaaggattaggacgtggatatggagggagtctttattcagcccaccccagggaacccctccccacaacctcattaagggtgctgggtaacatggggcacgtgcacttgccaaaaggcaaactacggtcctctgaatgccatgagccccaggtttccaggtgaggggtgatgcccctgtga[132 bp omitted]taaacgccatctctactaaaaatataaaaattagccgggcgtggtggtgcgtgcctgtaatcccagttactcgggaggc[136 bp omitted]gctcgcttgctgcgccaatcagcaaattgtttgcaagccctgagcacagagcctgcagaagggggtcccttccatgtccaagcagtaatggctgcagcatggagcgttgtgggggcattgagacaggaggccttgttctagcaggggaggtttgggactggtcgcagaggaggtgacacaagctgtaaggtgggcaggaattcagggttggaggcagaggttctgggcagagacttaaagggtccgggataaaggggaggactggcaggaatcctgcagtagcagaggcagtgagggcggaggtgagaacggcgccaggtgacaggccaagactctgccaccataggacacaaagggggcaatgtggagggtagggaggacggtgtttctggcaaagggaacacctcgccaaaggccgggaaggggaaggaggttgctggaatgttggaggtaggggcgcagtgctccccagaggctcctcaccccctggtgccccctcttctccaggggtctgcggcgactggaagaaccacttcacggtggcccagagcgaagccttcgatcgtgcctaccgcaagcagatgcgggggatgccgaccttcccctgggatgaagacccggaggaggacggcagcccagatcctgagcccagccctgagcctgagcccaagcccagccttgagcccaacaccagcctggagcgtgagcccagacccaactccagccccagccccagccccggccaggcctctgagaccccgcacccacgaccctcataataaacacgtcgattctgtccaggttccttgatgcgctgtggcagggcaggcagcggggcgtggagaatcctcaccacaccaaggcttccagaggccggggtccccgactcagagtcccgcccagaggcaaaggtgctgcaggaacccagcgctgggcatctcacttcccggggtgggggcctgactccccagtctgagggaggagggggctgggggcctggactcctgggtctgagggaggaggggctgggagtctggactgccgggtctgagggaggagagggctgggggtctggactcccgggtttgaggaaggaggggctgggaggctgcactcccgggtctgagggaggagggtctggaggcttggacccctcagtctgagggaggaggggttgggggcctggactcccgggtctgagggagtagtatctgggggcctggagtctcgagtctgagggaggaggagctgggggcctggacccctgggtctgagggaggagggggctgggttgtggactcttggattcagagccagtctttagtaacgcacgtttttggcataaagtggttttattccgagcagaggtaaacgggagctccggcagacccgccctctcagcgcccacagaaagtcccaccacccaccctgttcccctgtggctgtaccacattccactccctcagtattcagctccttgcctcagtttccccacagctcctgaacacagtgtgcctggcagcgactccccatcttcccctccacagctctagcagctctagctcggggcctcacccgggcccctcatcaggaaggcctgaccctcgggagctgtgtgtgtcttctttaggatccgctgcctggggacgctgccagcccatcttctgggttgtgacactgaggtctggtgcaggcaatgggcttgcccaagtccttttttttgtttgagatgaaatctcgctctgtcacccaggctggagtgcagtggcgtgatctcagctcactgcaacctccgcctcccgggttcaagcaattctcccgtctcagcctcctaagtagctgggattacaggcgcccgccaccacacctggctaatttttgtatttggtagagatggggtttcaccatgttggtcaggttggtcttgaactcctgacctcaggtgatccacatgcctcagcctcccaaagtgctgggattacaggagtgagccacctcgatcagcctttctttttcttttttcttttttttttttttttaaagagatggcctctcactgtgttgcccaggctggagtgcaagggcatgatcttggctcactgctgcctccacctcctgagctcaagggatcctcccacctcagcctcctgcgtagctgggaccacaggcgtgcgccaccacacccaactaatttgtttttttaattgtagagatggggtctcactatgttgcccaggctggtctccaactcctggccttaagcaaccctcccaccttagcctcccaaagtgcagggattacaggcatgagccaccactcccggcccaagttgcagaacaagtgacaaacatcccttctgcttgacagacgccgaggccagaagccttgtccaaggcagggcattgaggcagagggctctgagccgacagttgtccggcactgctccttgggtgggccagcagatttggcttgggctcctgttcagggttgccccccaagtcctgcccggggggcccagtctgacggcctgacgcctctgggctcttgaagtttgaatgtagcatccccaccgaaccgccttcgggctggggacagatagcggaggcggtgggcggggggcaggggcagggcaccgccccacggaggtcgggagtccacttccccccaggggcctcctccagtgccccgctgcctcatcagagccttggctggagtgtccttggagccccaggatttcttgagctgtggagggaaagagagggaggtgagaggaggctggggtggggccctgggggcatcccagatccagggaag[143 bp omitted]tgaaaccctatctctactaaaaatacaaaaattagcctgaggtggtggtgggcgcctgtaatcctagctactcgggaggctgaggcaggagaatcgcttgaacccggaagggagagattgcagtgagctgagatagcgccaccgcactccagcctgggcatcagaacaagactcagtctcaaaaaaaaaaaaaggaagtgatagaggatttgagggaggtggaaggagatggtggaggagggaagggagggaagagaggagagagggaggagagagatggaggccggacgcggtggctcacaccagtaatcccagcactttgggaggtgggaggattgcttgagctcaggagttcgagaccaacctaggcaacacagtgagacctcatctctccaaaaaatacaaaaattagccaggcgtggtggcgtgggtctgtaatcctagctacttggaaggctgaggtgggaggatcacttgagcccaggaggttgaggctgcagtgagccgagatcatgccactgtactccagcctgggagacagagcgagaccctatctcaaaaaaaaaaaaaaaaaaaaaaaatgggtggaggaggtaaaagaagaggaaggggtaagggagaaggtgagggaggagaaagaaggagaggagggaggaggggagccaggaaggagagagaggagacagagagggtgaaaggggaaggatgaggtgaggaagaggcaggaaggcagcagcaggaggagggacagaaaggagagggatgcagaggaggaagcaggtaaggaggacggtgtggggagcccgagagggaaggggggaagtgagagggcaaacctgggaccccctaacctacagagggacaaggagctgggtccccacctctgcagctggggaggaaccggaagcgccggcatctgccagccgggatcaaatatttgccaagggaggggatgctgggtgagggtgctcaggaccaggtgaaggtaaggaccttgcccctgcccatcccccgtctcctctccagctaggagccttccttgcctgggacggagggagatgattcctgattcccaaggcattgcagagcaagaccctatctcaaaaaaaaaaaaaaaaaaatatatatatatatatatatatatatatatatatatatatatatatatagctttctttggcctgggatgaggatgtcacaaaataaataaattccacttcaggaatgtatttatttattgtttattattattattattattattattattattattattattattttgagacagccttgctctgtcacccaggctagagtgcagtggaacgatctcagctcactgcaaccgccgcctccctggctcaaacgattctcctgcctaagcctccggagtagctgggactacaggtgtgcaccaacacacccagcgaatttttttgtatttttagtagagatagggtttcactatgctggccaggctggtctcgatctccctgtttcaggaatgtattgttgttgtcattactactctatttcatttagccaagtggattcctcccccaaccaaactcggaatgagtgcccttgctctgctccttcctagatgaggataccgaggttcagagaattcaagtcctcggcttccccccacctagtctgtcatgccaggatttgcacccagggctctcctgtctctgccccatgccacccagcgcccacctgcccaaaatgcagcaggcgtgcaggaaatgaacaaacgatgccattatgaatttaggggtgcaggccctcaggaaacgcctgctctggctgggagcagggcccctggagcctggcttgcaccaccctgggcaaacgccttccccttcctgggctccatcttctggcaccagccacaaggtctcacctcgttgtccccatcactggagccagacagctgggacaggcggcttaggtcccacatggagcggctgggccgggccggggggccgctgggggtccgggcgcgctgcacactccttagaatgtcactgagtgccggccccggggtagcaggggagacgcggcaggcggccaggcggtgggccagcgggccgtcaggcggcggaggcgacgcgggggccacggagcggcggcgggacacgcggtgcgggctgcggccccgctgcaggccacctatgaccgagggtttctgggggggcgcaggtgggagcgggcaggaggccgcgtacagcgtccggaactcaaggctgaaggcgtcaacaatttcaccagtcagcagggtcaccaggcctcggtgcaggcgtgcgtcactccacgtgaagctgggggtcggggagtagggggtcagagtctccaaccctgagggcccagcccggcccccatcctcagccaggtcccaggggagaccgtaggacctcaggcgagtcctgacctctccagcctcagcttccctgtctgtagaatgggcacaactgaagtacctactcgggaggggtggagtgaagacagcccaagttaagacacttatataatcagggccaggtgtggtgactcacactttgggaggctgaggcaggagggttgcttgagcccaggagtttcagaccagcctgggcaacatggtgagaccctatctctacaaaaaatcaaaaaaactagccaggtgtggtggcgcacacctgtactcccagccacttgggagactgaggcgggaggatcccttgaccctgggatttttttttttttttttttttttgtgagacggagtttcgctctttttgcccaggctggagtgtagtggcatgatctcggctcactgcaacctctgcctcctggcttcaagcaattctcctgcctcagcctcctgagtagttgggattacaggcacctgccgccatgcccggctaattttttgtatttttagtaga[143 bp omitted]ccgtgataataccactgcattccagcctgggcagcaaagcaagaccctgtccccctcgcccccctcccaaaaaaaaaaaagccagatgcggtggctcactcctgtaatcccagcactttgggaggctgaggcgggcagatcatgaggtcaggagtttgagatcagcctgaccaacatggtgaaaccccatctctactaaaaatacagaaattagctgggtatggtggcacatgcctgtaattccagctactcaggaggctgaggcaggagaattgcttgaacccgggaggtggaggttgcagtgagctgaaatcacaccactgcactccaacctgggcgacagagcgagactctgactcaaaaaaaaaaaaaaaaaaaaaaaacttatctggaatcagactggagtttaaacccaggctctgcctggtccccacttaggaacacctcaatgcctcagttttcccctttggaaagagacggaattcacttccggacactaacagggattgttttaagacccagctgcttcctagaatgactgccatttagtcagtcctggctgtgcaccaagctctccacgttgctgctccctgcagtgct[133 bp omitted]aagaccccatctctataaaaaattttacaaaattagccgggcatggtggtgcacgcctatagtcccagctactctggaggctcagggaggagaatcacttgagcctgggaagttgaggctgcagtgagccaagatcgcgccactgcactccagtctaggcaacagagcaagatcctatttttttttttttttgagatggagtcttgctctattgcctaggctcaagtgcagtggcacaatattggctcactgcaacctccacctcccaggttcaagcctcccaagtagctgggattacaggtgcacaccaccatgcccagcaaatttttgtatttttagtaga[153 bp omitted]aacataggaatattcaaatgactgaatttgaatcaagccccctgcacgtagctggccctgagagcctgtgagctgtgggggccggtgccctaacacttcctgtcatcacagtagttgttattgaaagcaccaagtgccaggcgtggtgtggtggctcacgtctgtaatcccagcactttgggaggtcgaggcgggcagatcacttgagctcaagagttcgcaaccagcctggcctacatggtgaaaccctgtctctactaaaaatacaaaaattagccagatgtggttgcatgcgcctgcagtcccagccactcgggaggctgagttacgagaatcgcttgaagctgggaagcagaagctgcagtgagctgagatcacgccactgcactccagcctgggtgacagagtgagagactccgtctcaaaaaaataaaagcaagcaagcactgagcatgaatcctggcacacagcaagtgctcagttaatacaccctcttctttcccagcctctttggaattcaatgaacctggctctcatcctggctcggggaccctggatacatcactttccccagccttagtttacccatctggaatatggggtcactatgggaggtgtgaggctgaagtcaagcccttggcgggtgtacagcacagagaatgcggacaagcttgtggccagcgtcctctgggttcagggcgtcttcaccttggcagggatggcagagccctcttgcgccccggcaggtcggcggggcaggccaccccttggattgtgacacccactcctctcacctatgacctcatccccagagcggccagtgggaaccctgagggatctgtgagatcactcattccattcacagactcttgttgggcagcagccacccgctcacctccatccccaggacttagagggacgcagggcgttgggaacagaggacactccaggcgctgaccctgggaggccaggaccagggccaaagtcccgtgggcaagaggagtcctcagaggtccttcattcagcggttccgggaggtctgggaagcccacggcctggctggggcagggtcaacgccgccaggccgccatggtcctgtgctggctgctgcttctggtgatggctctgcccccaggcacgacgggcgtcaaggactgcgtcttctgtgagctcaccgactccatgcagtgtcctggtacctacatgcactgtggcgatgacgaggactgcttcacaggccacggggtcgccccgggcactggtccggtcatcaacaaaggctgcctgcgagccaccagctgcggccttgaggaacccgtcagctacaggggcgtcacctacagcctcaccaccaactgctgcaccggccgcctgtgtaacagagccccgagcagccagacagtgggggccaccaccagcctggcactggggctgggtatgctgcttcctccacgtttgctgtgaccaacagggaggacagggcctgggactgttctcccagatccgccactccccatgtccccatgtccttcccccactaaatggccagagaggccctggacaacctcttgcggccctggcttcatcccttctaaggctgtccaccaggagcccggtgctaggggaagcatccccaggcctgactgagcggcaggggagcacggcccgtgggtttgattgtattactctgttccactggttctaagacgcagagcttctcacatctcaatcaggatgcttctctccattggtagcactttagagtccatgaaatatggtaaaaaatatatatatatcataataaatgacagctgatgttcatggagcattctttgttttcttttctttttcttttcctttttttttttttctttttgtagagataaggtccagctatgttgcccagggtggtctcggattcttgggctcaagtgatcctcccacctcagcctcccaaagtgctgggattacaggtatgagccacggcacctggccaagcctgtcttacgttacgtgccactgaatcctcacaccaagctgggaaggtaaacactctttcaaacatttcaaacatcctggtctcaactccaatcattctcaaagtgtggtccctggaccagaaacagcagcagcagcaagtgggaacttcctgaaaatgcagattctcaggtcctgttccaggcacgatgaatggcagtggggtccaaaagctgtgtattgttctctctttttctttttgaaacagggttttgctctgctgcccaggctggagtgcagtggtgcaatcttggctcattgcagcctctacctcctgggctcaagcaatcctcccacctcagcctcctgagtagctgggactagaagcatgctccatcatgtctaatttttatttttttaaatttttgtagagatggggtcctgctatgttgcccaggctggtcttgaagtcctgggctcaagcgatcctcctgcctcagcctcccaaagtgctgggactacagacatgaaccaccacgcctggcctttttccgttttctttttcttttccttttttttttttttttttattttttgagacagagtctcgctcggtcacccaggctttagtgcagtggcgcgatcttggctcactgcaacctccacctcccaggttctagcgattctcctgcctcagcctcccgagtagctgggactagagatgcattccaccaggcccggctgattttttgtatttttagtagagacagggtttc[132 bp omitted]gggattctggtgcatgcacagggttgaaagccactgttcctgagcagtgttctcagctgggcacctgtgctccccagtgggcatctgcgctgtctggagaggttttcggttctctaattggcagggaaagtcgggggtatggggcgtgtgatgctactgacctctgctgggtggaggctgaagatgccgaggagcctcccacaatgcacccaacagctcctaaaacaaagacttacccagcccgagcgtgggtgccacccctgttgagggacctggttctagaggctctaaccctatcagcccatgacatagagggggaaactgaggcacagagaggtgaagtaagttgcctgaagtcacacaacgaggaactgagagagctagaatttgaatccaggccgtctggtcccagaggccacacccctctcctccctagctgtgctgtgaccctgtgaggtaggtgctgttattatttgcagtttctttctttcttttttttttttttttttttttgcttttttgagatggagtcttgctctgtctcccaggctggagtgcgacagcgcgatctcggctcactgcaacctctctcctgggttcaagcaattctcctgcctcaacctcccaagtagctgggaagacagggtttcaccatgttggcc[131 bp omitted]ggcagagcttagatcccaatccaggtgctcctgattttgaacaaaccccacccccaaactgtttgcccagttttccagataagaaaacaccaggtcaaagagaagcagacttacccaagaccactaaacaggccagcaccaggtccggccgcggcaccaacctcctccgcagggaagagtgttttgcccccattacacagatgagaaaagagaggcctgggcaaggggatgccagctgttctctgagcacactgagggaaagtggggtataggacgccgggaggtggggggcggggcgggggctacacctgtaggatcctgagatgaccctctcgccgtccagcagcacaaacttctcccgcacggtgccgctcacctgccgtcgccagcggctctggaagctgcagccccgcacgacacggacatccacgttctgttggtgtggggagtggagggtacacccttgctgaggcccactgcatggattcaggctccctccagactggttctaactgggggacc[140 bp omitted]ctctactaaaaatacaaaagttagccaggcatggtgacacatgcctgtaatcccagctactggggagtctaaggcaggagaatcgtttgaacccgggaggtggaggttgcagtgagccgagatcacgccactgcactccagcctgggcgacaaagcaacactccgtctcaaaaaaaaaaaaaaaaaaaaaaaaaagaagtatctgtctcagcttccttagagccactgatatcaaccctcaggcgtttcttggggatacccaaactcagtgactcaagattccttgggaatgcccacccccacctccccagtgctgtgggcatcagatcccaggggaccatccctgctagcatccatctcaatgacccggagctccatggaagggtctgcccccactgcccccatgccaggggaatggggactcacaggaccccctggcccggcccctacctccgtgttccaggggttcacccccagctgctgggccagttccaggaaggcaggcagctgctggcggtccaggagcaggtagacaggtacccagcggcgcgtggcagcatccaccaagtccaaaagcaggtctgggtcagtgaagacgtccatgaccacggccaccagctgggcatggggagaggggcggtgggcttgtgaacggaagctggctcaggggacactcagagggtgtgggaaacctgacatctggaatctgggagtaaagtgctctgggggctgggagtttaaagttcaggtgggctaaaggggagacccccagacatacactgctgctcaaacagcacctacgtgtgaatgagcaaaacgctgcccctccatgagatccccagcccctcctcgagattcccggcccctaaatgctggaaaactgtaatcataaatcatgtttgcttgtttttttgtgtttttgttgttgttgttgttttttgttgtttttttttttttgagacggagtctcactctgtctcccaggctgcagctcaggggcgcaatctcagctcactgcaaactccacctcccgggttcaagcaattctcctgcctcagcctcccaagtagctgggactacaggcgcccaccac[141 bp omitted]ggctttttttttctttttttaaaagacgaagtcttgctctgttgcccaggctggagtgcagtggcgcaatatcagctcactgcaacttcggcctctgggactcaagcagttctcctgcctcagcctccagagtagctgggattacaggcacccaccaccacgcccggctaatttttgtatttttagtagagacgggatttcgccatcttggccagggtggtcttgaacccctgacctcaggtgatcccccagccttggcctcccaaagtgctgggattacaggccgtgagccaccgtggctggcctacaaatcacgtttataacacagaacagcgtcccctgagctgcgacactgcggtacccaaatgtccacggcagtttggctgtaggatcagtggtggatgtcccgtagggcactgtgggcaactgcatttctgggtcctgtggaattttctgggtgctgggtgcaggacggctgacctgctaggccaccgtggcgaacttgggggacacggaggtgctgaaggcctggatcttgcaggcagcataaagcagtggaaaccctgactcagcagccagacagcctgggttcaaatccccactcggccacttacagggaagagatttaaccgcccccgtgcctccgtgggcacaatagtccctctggcggtacagggttccgggacgatgatgcacattagtccctgagaaacccttcacgtgggagctggcggacgctaaggctgtgaagtacacagcaggctttccaagggctgcagtgtggacatctgggccttccttggagggagagtggaaacccctggcttggtgatgaggggatgggggaatgactgagactgggggtgtcataattaggttcaaggggcatcgatacctaagggcatccaggtcttgggggagggtaggggcccccatttctttctttttttttttttattgagatggagtctcgctctgtcgcccaggctgaagtgcagtggcttgatcttggctcactgcaacctccgcctcccgggttcaagcaattctgcttcctcagcctcccgagtagctgggactacaggcgcccacaccatgcccggctaatttttgtatttttagtacagacggggtttcactatgttggccaggctggtctcaaactcctgacctcgtgatccgtccacctcggcctcccaaagtgctggaattacaggcgtgagccaccgcgcccggccgggcccccctttctgagagtaaggatgaggtctggggttgtaggcacctgagtcctggggctggaaggtgtgcactcctgggtcccaggggtataggtcctttagggtaggggtgtgcgcttgcaagtcccaggaggacaagggagagaatgcctgggtccccgtcccagtctggtgaatggacacagggcccccgcgacacccaccttgtgggcagcctggatctccagccgcaccagctccttgaggggcggctgaccctctccaggaggctgggtgtacagctgcgcccgggtgatgcctttccacgcagagtccactggccagcccagccgcaggacgggcgccggctgctccgactgcccaggccagtagctcaggctgcccgcgtccacatcggtggtggtggctccctctgccatcccgctgggctcctgcttggccactgtccagtcttcagctgccgctgccaagccctgaacctcatccgcactgaggaagggccacagctcctcgcgctgcacgcaggtctggaacgcctccgcgcccttgctcaacagagcctccagtgccagccgctggccctcggaatatagaaagccggggctggccccgggcaccctgggaccggagtccactccttccagcgccgccagctgggaggccgccatcggggtcactcgggtgggaggactgactgtgagaggctgggtccccgggggtctggctgtctctggggactgtgatcatctgggggttctcctgataggcagaccctacgtggccatccgaggcctccggcggggccctgcagatgtccaaatggctccctgcagcagcccctgccacactgttctgacaatcacgctgcccaaataagcgaccatccaatgtgtcaggccactcagatccgccacctgcctgcacccagtggcaccatgcctggctggccttccgtgaccttcctgccagccgtctctgctggtcaggttgacctcctgacaccatccccaactgtgtgacccatcagctggccatctctgctcagccacacgacagcctccaacccaccagtcacacagtgcccagtcagacccttcagctgtcctgaatttggtcaggctgaccacttgatcatttccaggcggcaagctgcctgcctgtctctaatcacccaaaggtccttaaaggcacgacaggttgcctgcctgcccccggccaagagcacgacgaactgaccctctccttccactgtctggcaaacgccaatggcttccgactgacagtcacagtatctgcctgttggagcatctgtctctggccaaatctgacagcccccacgagtttctcctgctcatcagctctcacccgcagaccagccaggatgcctctccactgggcctgctcgctcagccttaaaggccgaaggcttggcaaacccttccctaccctgtcaatgggggaccctgctccctggaccctcctcacactccttccagctgctgcagtggagggtgaaatgcgctacaggggtctccattactatgggacaggtctatgatcttcacagcccatctaggtgtgagtgccacctaaccagccaccctcctcaggctggctgcccctgcctggggcctggccctgggacctgttccaggccgtcctctgatctgcggggagccctacccaagctgcccccagcctggtttctgcctaaatgctatctcctgccagctacccggacgcttcttcccggacaggggccagtctctatctcgccctgtctccctcccaagcctcagttatccccttgaggctcctgacccaacctcggggaccctggacccttgatccctgcaaaccagaagcccttcattccaatcccaccaacccaggccgctgcttcctccagaccacagcagggagctgcaaagagaagaaaggagtcaaggcaggccagcctccccgccccaccctcacccatcccccccatcgccggggctcacccacaccggctagtgccgggctcaatggcctcccttccagtgcctgctttttccgagaacgtaggctgtggctccccggcttctacttctgcggtgcttcccggcttctggcctcactcatcaggcctcgacctggaatccagggagcccggccccttgtgtaaacacaggagggcccccacaggcccctggaggaggtccgggggtgcggctcacacgctttctttacctgtgctctcccagggggtgaacgcccctctagactcaggcttcccggtccccggggggttgagattgcctcacctgttcccaggcagtctctccctccccacagccctgccagcctgcaccctgcacttcccggtccacgccccacccgccatcccagcaccagggaggggcacaggatcctttaagaggggcgggcgtggctgacccaaggaagccggtgtgggaacacctgccacctggctgttgggaaggaggcagggagcttccggggcagtgggggcaggaagagggctggtcttcactggcatgacgtccctgtccccaaaccaaatgcattctcacccgcaggaaccaattctccaacccatcccccaataacacacacagagcactgtcagcaaaaatctttttaataagagagtaggatccagggttagtttttgtagcctcggctggcccgtcggcctctggcacgctcgaacttccggcccttggagcggacgtagggtctgtggggagaggagggagtgagaggggggccctcttaaaggaggccattgtggagtggcacaggaacaccacaagcctgtcacattcagccccaggagagtcaatgctgctggaaaagcttggcagagtgggaagccaaggagccaggaggggctatggaagcacctgccccaccacctggagggtcccagcctgggctggcaaaggccggtgaactgcatgctccccaggagatgcctgctcaggccctggaaaacacagctccaagcagtgttgaagggaaaagcaggcaggatgaggcagctgagagttccagaaggcctggggctggctggtacgagggataggagaagcagcccaagtgtggccaggcctggccctgcaggctgagtctggggagagggcagggctgggggcctgatactcacttggtgtggctgtgcggggttcctggggccttgccgaaatgccggtacacctctcggcccttgcgaggacctagggaaggggaaggagaaccgggtgagacagggatctggcgcccagcttctggcctcccagatccaggagggtgaaggctgccagtagccacacagctcagtccaaacccgtcgaccacgtatcactcaccggagagcaggacagtgccacagcccttaggggagtccagggccagctggtcgaaagtgaggatcttgccccctgccctgaggatgcggctgcgggcccggctggtcacgcgcagtgcacatacctggtggagaggacaaggctggcgggtcagacccctgcgtggtcacccaggggctgccaggactcaccctccactgccttggcgcagcagagccctggtaaccaacactatcgtttactacccggagcaccctgggctgacagcagcagttctcaacacttccggaactttcaccaccacatccctggtgttatgctagaaactacagcaaggaagctgggccaaaaaaagacctgtgcagaggtgacaaaggagtctagacttgagcccaggctgtctggctctaggggccagcactaacagtttacaacttgccccagaagaagcttgcccaggggaccccaccatcaaccatgccagagacgacccacaccaatcctcaaagccactcagacaggcaggatgcttgcctcaccagcggtggcaagactgaggatggaccagcacagcacagcacagcacagcacagcacagcacagtacagcaagggtctgatgggtctgcccagcccccgccagctcaccttcagtttgggtacctcctgaacccgcacatcatcagttatggtccccacaaccacggccgtcttgttttcccggccaggaagcttcatcttccggatcttagggtggggaggatgtacgtcgtaagttgttctggtgtttacattcagccccgcttgaggcatccccaggccagggcagctgtgccctctaacgggaccccccactcacaccacaccccttaaaccccacaggcctctcctcaggtccagctggggaaagctccagataaaaaaaaaaatgcagactgttcaatagggcctccctcagcagagcctttgacataaaactcagttatgacttggggcaatctcctgaagccaccaggacacctccacctcacaaagagaaggagaggaggaccaggagacttgcccactgcccatggacactcagttccaaccaacagtccaagctctacgctcgcgactggctgagacaaacccttgatgccctggttgctcccagagctccaagtcctgcctcccttccagacagacaagacccagcggctcccaggtctaccgtgctctctggaccagccactcaccatccgggaaagggacagaggcggccggttggtgcgactcataaacaacctcttcaacacaacctggttgaatgtggagttggttcttctggccagaaacctgtataactggagggacgggaagacagtgagaagctgggacagcctgctcccccgcagccttccagtgaaggggcaaacacatgatgatctggactaaaataatctttatccctttcccccaacccaccgacctagagggagaaagctggcccaggtccttcctggccaaggacctagaaaatcctggctccactcccgagctgtacacagcctagaggctgaaaatacaaatgcaggagaccctggaacagaaccagagacccgagactgctctgcaggcccctgggaggagcttggtgccagcactagaatggaggatctgcaagtcagacctggggtgacccttcccaaagacctcagggcccagcctcaccttgaccaacagcctcaggtagatatcctggctcttgggctccttgcgccgaacctttcggtccttgttatggcggatgtccactccctgtgggggtgaagaggcaaccatggacccaattacccccaaccatagccaattattacttatttctgaaactgagagctgggacacaagcccaggtctgaacacaccagctcaaatcccaggcccaccaccaggagacctgtgggctgccactgatccctctgtaaaaaggggctgtttacaaagccttcagcccatggcacacagaaccctgaaacatcgtaacacagcaatcatattaacttaatacaaaaaggtcaattctttacaacttgtattttgcaacaatgttatcaaaactggttcccatacccggagggataaccaaaaatatcaaaccaatggcagtaatgatgaaaacgaatccttattcagaacctagcaatactactagaaccacctctcctacagcatcagtcaatccaacaacccttaccaaatagtgtctttttaaaacatcgtttttaaagtggagacagggtctcacaatattggccaggctggtcttgatctcctgggcaaggaatcctcccgcctcggcctcccaaagtgctaggataacaagcgtgagccgcctcgccaggctcctaccgccctgctgcctttctgagcaacttaagtttttcagactgtgttgacaattacaagaactatttaatagctccacttatgcagcacttactgtgtgcaaaaccccgtgatgagcatctcctgtgaattatttcttcccaaattcacaaacttgtcagatgagattactgtgtacccaacgaacagccagacactggggcaaaggctcaaaaaccatcacaaggtgggaaggggcctgagactcagagacctgcctggtccccaaatccagttattcggctctcgatcctctcacccgccgcggcccccatcgaacccgacttttcatactagaaagtgacaggtccagataaaggcagcaaagccaaataactaagagtggctgcgggtccagccacctgggtcggaatcctggctctgccacttcctggctttgtaaacccagtcatatcagcctccgagtacctccacttggtcatctactaagtgggggcggtaggctatgactgacccatccctgctttcctggcccccagagtaggtccccagtatcgggaattgctccctccgggcagccgcagaccccctgccgccctccagcgtgcccctagcccaaaaccacggcggatggcagcggattatccagccccgaacgccgcaaagcgagctcaccatgatggcgcctcctgctcggccaggtccggaaagagagaacgggctggggtgggcggggaaagcctcaagcgagtggcgccgccgtgacgtcacatgggtgcgacgcggcgctctaccacgatccggacttctctgtggtgagttggacgactgactagccgggcgataacggcagagagcatagagcgcaggaacaagcgcaacgtccaagagggaagggccagcacgtcgggggcctctctggccctacccaggccgtgttctcgatagctttccggaagaaagggatctgggagcgagatgcgtgtagctagcacgatgcgtcgcgcggtgacgctctggcccgacgccgacggcctctcagtggctcccggaggacccggcgggcccagtgttggaggtgaggaggcggggctggcagggctagtcggggcatctggaaatttccgaccccacgcttcgggcgtttccttatcaggttcaccgctccctgatctcgcgctgcacttcgtaggcgcagccgctgcttgggaagtcctacttaaggtctaacccgagatgatcttgctgcacctcaatctatagcatcctgtattcccatcctttgagttccgcttctccttctcccccggcccctagatggcccttccctgacctagaaagagggagacagagtttcataggggaggcaaaatggagactccgtggcttgggggtggggggaatggaggcccaaagggtaggaaggagacctagaaagaggggtgagatggagacccagggagaagtagtggcaaagaaagatggtgagatggggccttgcaaggctataaccaaattcaaatcctggctctgctagttactaatggggtgattgggcaagtcatttaacctctctgtgatcttgggaaaatcacttaacttctttgggccttactctccttatggacaaaaaggggatgacaacaggcctggcacacaggggtgtttttcaggattatgaaagttaataaaactgctgaggtcaatattttgcacataataagtgctcaataaaaattagccttcactcctattatagcatacatattgtgtgcaaccagatggactggctggggcagtgattaaaatgacttatctactcttccccccacccgccagggaggcccctgcctcttggttctcaggcacattgagcctggaagggcctcctgcagttggctgtcaatgctgctcctcacttacctctcctccacagagctgaaggtcaggccaggacagtgagacctgactccttgctcctaccagcctactatggcttaagacccagggccagggtcccgttgatgtaacagagcagaggaccagcagatgaatggacaccttgaagcagaggagcagcaggaccaggtaagggaccatctaaaagccaagatcctcatactgtggaaagacaaaatctgaagcttttctttaaaaaaaaaaaaaaaaaattggaggccaggcgtggtagctcaagcttgtaatcccagcactctgggaggccaaggcctgcggatcacctgaggccaggagttcgagatcagcctggccaacatggtgaaaccccatctctactaaaaatacaaaaattagccaggcatggtgatgcgcacctgtaatcccagctactcgggagactgaggcaggagaatcatttgaacccgggaggcagaggttgcagtgagccgagatcgcgctgcactccagcctgggtgacagagtgagactccgtctcaaaaaaaaaaaagaaaaaacagggtctcactcttgcccaggctggaaagcagtggcacaatcacagcctactgcagctgcaacctcctgggctaaagtgatcttcccacctcagcttcccaagtagcctccaccatggctggctaatttttttatttttatttatttatttattttgaggtggagtttcgctcttgttgcccaggctggagtgcaatggcacgatcttggctcactgcaacctccgcctcccgggttcaagcagttctcctgcctcaacctcccaagtagctgggattacaggcatgcgccaccacacccagctacttttgtatttttcatagagatgaggtttc[133 bp omitted]tccctctgttgcccaggctggtcttgaactcctgagctcaagggattctcccacctcagtctctcaaagtgttgagcttacaggcatgagccaccgcgcccagcctgggagcccttccataagtgatttcagaccttctctccaggcaggtgttccagtgggataatttaggaatcagagaaactgaggggttgaggaggatacttattatttattatttaggtgcactggcccagtcagattaacatcgaaaaagactgagcaccgaacaaagagtcaagttacattttaagtatttcgtggggtagggggagatctgtgcagggggaagcatattatagcagcgagaaacaaagacagttattcaattgagacatgcattacattatttcttacttttcaaggaaaaacatgttttaggacttgagtttatcctgtctagtgaccttgcagctgcacagttagagaaacagggtcttcacgatgcctgggaaagggagttagataaggctcactagccacaaac[223 bp omitted]c[139 bp omitted]ctttctcttcctcagggggaattgggttttttacatacaactgagtttttgcttacacattctttaatttcttttaattcctgtttcagtgtgaatagctttctccctacttcccagacaggacagctgaggccaagaattcaggggcttcccagcagtcacacagcaagtgtgtgtgagctgcagggtcctttctccttttcctcctccctgtcctctcgtctgtgtgacttaggctctatgtttgaatctcagcttctttgcccagtgtctctgcctttccttctcccagggccccaagctcagttgctgtgccccagtctcagtcttactgggtttctgttcccccttctctccgtgtcattccttggcacatactatctggtgctgttgctactgtgggttggatgc[137 bp omitted]acctccgcctcttgggttcaagcgatctcctgcctcagcctcctgagtagctgggattacaggtgcgtgctaccaca[137 bp omitted]cggtgaaaccctgtctctactaaaaatgtaaaaaattagccggacgtggtggcacgtgcctctagtcccagctactcaggaggctgaggcaggagaatcgcttgaaccaggcaggcggttcagtgagcctagatcgtgccgctgcactccagcctgggtgacagagccagactccatctcaaaaaaaaaaaaaaaaaaagagagagagacgggggtttctccatgttggtcaggctggtctcggactcctgacctggcgatccacccgcctcggcctcccagagtgctgggattacaggcgtaagccaccacgcctggcctacagcctacatttgtcactttctagtgagctctgtccttgtctcctaatgcatatctctttctctctatgcaattctgtttctaagtctcctaatatatacttgcctttctttcaatttcaccatgtctttgcctcggtgcatctgtcaacatcttcactttctgtcccagttcctcccagcccctgggcttccaatattctctccctccctcacctttgacctagagatactgtccccatctctctgtctctgtcttgccatgtgactggttcattcactgggcagatgtttatctcatgccgcttccattctggtttgagcctgagataaataagtctgaattaatgagcctctccttcgcggcttccattccagaagtgtctgtctccatctgtctccgtgtctgtcattttcagggttttcttgtatccttaccttgcacattctcaatcccactgttttggtctcttgtttatatctctgcttttctctgggtctctctgactctgtaactgtccgaaaaaaaagtatccttcactttccccactctccctctcctcccagctctcttattgcctcatccaacctctgtgggtctctgccttgctctgtgtctggatcggatctctgggcctttgttacgcgtgttagagtctctgtctttgcagctaaagacctcctccctcacgccccttttcttttgtgaattcaatggatgagacaggcccactctcccttaacaaagatggcgacaacggcgctgtctatggggccgcgacgtcgtctccgctgcgcgtcggccctcacccacgatggcggccagtctcccgaagcgcgaggccccgcccagctctcggcctctcccgcggccggtccctgcaccaagctcgcgagctgactggctccaccccccgcgccctcgtattggtgcggcccaggccggctgcacggccattggctgagcggatgcacaccctccccccacccctaggtctgatgggggctgttggtgctgacttgcgggaccgcctggaggaggacccggcgtgtgaggagggtgcgggggtcggggcagggaccggagtctaggggactgagggaccaagaggaacagagactcaggcccgggactggggcaccggggtgggagatggaaatggaaaacctgggccaggactgaacccagccaggcctgggactgggttctggaaataagagtgcggatggcggtttgggggcccagggccagacacgcaggcctatggattggggaccaatggatggagacccaggtccaggtctcggggacccagggacagagacccaggcccaagactggaggacatctagggctctgtgcttgaacctgatttgaggttcccataatggggccagggcaggtttgggggtgaagcagacgtcctggacccgagagagccgctggggataggggggcagatgtagttcctaagggtgagtccacaggcggtggggggtggggggctgtcctggcgctctgggcctggggaatgtgaggggcaggactggcaggtggctgggcggggcagtggggaacaaaggtgagcgaaaggaggaggcagaatccgggcagagggcagggagagggcctgtggggaagggacctcagtcctgctcccacccgctccctggagagcaggcggccagacacccaggtcagtgctcagggaccagctcttggcccctgccccttgcaggcgctcgcatgtggctcctctcggaccccgtagtccctgtcatatcccttctctccagctgtctccatgcctgcctcgtacccctcctatttgctctcccttccactctgtcttgcctttctcgttggggtgaaaaagtcttactctcttaagtatctttcatcgcctgagtttcacctcattgaccctgtttgtctcctctcagtgtttctctggctctcagaccctatctctattgcgtttgtgattgttttgctgttttacccactgcaccgtatggggggtgggggtgtcggggaggtgtgtctttcagtctttgcatgtctgtttctgcatatccaatcccactatccattccccttcctgtgccttcttttcccccaaagcccgttatcatcacccaaccacctgtatatttcaatcctttctcttgtttatctattcctatgaaggcaaggatttggggctattttgtctcctgctgtgtttgctaggcctagcaccgtgattggcacataaagggtactgaatacttactggggaataaatgattggatgtttgcatgcccgggtctccggccccctctgggatgctggcctctgtcccgcatcctcaaggtctgcccacacctgtctgagcctgtctgtctctgatgctcctgtctcacctgccactgcccctcattgtctcctcctgtccacagcccctgcccctccctgcccctgccatggggtcctgaattctcaccccttctctcctcccttcccacagaggccagaccaggagctgaccgggagctggggccacgggcctaggagcaccctggtcagggctaaggccatggccccgcccccaccgccactggctgccagcaccccgctcctccatggcgagtttggctcctacccagcccgaggcccacgctttgccctcacccttacatcgcaggccctgcacatacagcggctgcgccccaaacctgaagccaggccccggggtggcctggtcccgttggccgaggtctcaggctgctgcaccctgcgaagccgcagcccctcagactcagcggcctacttctgcatctacacctaccctcggggccggcgcggggcccggcgcagagccactcgcaccttccgggcagatggggccgccacctacgaagagaaccgtgccgaggcccagcgctgggccactgccctcacctgtctgctccgaggactgccactgcccggggatgggggtgaggtgctgggcagctgctctatcctggagccaccttggtgtctctgcagaatttcctccataggcagctgtgtctttatttttctgtgtgtctgggtgatgtatctctctggatccgttaggagtgatacacagggatgggctacagaaggaacaaaaagacaagaggaccggatgtggtggctcatgtctgtaatcctagcaatttgggaggctgaggcgggtggatcacctgaggtcaggagttcgagaccagcctggctaacatggtgaaaccccatgtctactaaaaatacaaaaaattagccgggtgtggtgctgcgcacctgtaatcccagctacaggagggtgaggcaggagaatcgcttgaacccaggaggcagaggttgcagtgagctgagatcgtgccattgcactccagcttgggcaacaagagcaaaactctgtctccaaaaaaaaaaaaaaaaaaaaaaaaagcacaggcagaggtcgcgtgcagtggctcatgcctataatcccagcactttgggaagccaaggcaggcagatcacctgaggtcgggagttcgagaccagcctggccaacatggcgaaaccctgtctctattaaaaatacaaaaattagccgggcatggtgacggatgcctgtaattccagctactcgggaggctgaggcaggagaatcacttgaacccgggaggcagaggctgcagtgagccgagattgcaccattgcactccatcctgggcgacaagaccgatactccatcacaaaaagcaaaacaaaacaaaaacgcaggcagagaaaagtgatttacatctgctgttctcttgctagatttatgtttctgtctcctatcctcttcccctttgcatgggtcttgaccacaggtgagtcacccagggtggtgagagcagcagcctgagacaggaccaggtaccacccagagtgatgggtgccaacagaggtctagggcttccctggagttcagaggtggcatctaatcctgcctggggcccctaagggctggaagtaacctaatcctgggtaataggtgtttggggtgaggaaagtgggaaccacagctctgaactacagctcctcccacacatggggacaaagggcatttggtttcacacctaagccctgcctttgtctcagcagctaggagttggggcagggctgcatacctaggcctggccacatgagagccagcaggtcccaggggccagccctccaccaattccgttgggggctgatgaagggactgtttccaaggtggggggcctgggtcactggcctctgcagaccctaacctctctccacagagatcacccctgacctgctacctcggccgccccggttgcttctattggtcaatccctttgggggtcggggcctggcctggcagtggtgtaagaaccacgtgcttcccatgatctctgaagctgggctgtccttcaacctcatccagacaggtaagggccagtgagaatgggagctgggggctgggacagctgagtcctaagggagcaaagtggtgggtgggactcctgggtctatggggctggggtgggacagcctgcctaacagcccggtatcccacttcagaacgacagaaccacgcccgggagctggtccaggggctgagcctgagtgagtgggatggcatcgtcacggtctcgggagacgggctgctccatgaggtagagcaggagcaccctgcccctagccctgggccctgggggactatagagactgccaccaggacccaggcttctggtctcccaccctccaggtgctgaacgggctcctagatcgccctgactgggaggaagctgtgaagatgcctgtgggcatcctcccctgcggctcgggcaacgcgctggccggagcagtgaaccagcacggggggtaggttgaggataccacgaagggagggatgagcccctcctggggtgatagggacccctatatctcccactcagccaaacccacagtcagtcaagtaaatcagcctgcctgtgggatgctcacccccagctcctggacatttttgcctgcctgcttcccagctgtatcccgagcgcccagaactctgcctggcatgggaggcactcagtgaattgtagggagcaaatgaaagatgaccaggaacctggccccgtaaggagtcgcctggaggtggccccacggctgtggtgggcctgggccatggccttcgtggtctcattgccagctgctttcctacctgtctctttccccaacccctgtttgctccttccttctgtgtgtccgtccatctccggctgtgaagatttgagccagccctgggcctcgacctgttgctcaactgctcactgttgctgtgccggggtggtggccacccactggacctgctctccgtgacgctggcctcgggctcccgctgtttctccttcctgtctgtggcctggggcttcgtgtcagatgtggatatccagagcgagcgcttcagggccttgggcagtgcccgcttcacactgggcacggtgctgggcctcgccacactgcacacctaccgcggacgcctctcctacctccccgccactgtggaacctgcctcgcccacccctgcccatagcctgcctcgtgccaagtcggagctgaccctaaccccagacccagccccgcccatggcccactcacccctgcatcgttctgtgtctgacctgcctcttcccctgccccagcctgccctggcctctcctggctcgccagaacccctgcccatcctgtccctcaacggtgggggcccagagctggctggggactggggtggggctggggatgctccgctgtccccggacccactgctgtcttcacctcctggctctcccaaggcagctctacactcacccgtctccgaaggggcccccgtaattcccccatcctctgggctcccacttcccacccctgatgcccgggtaggggcctccacctgcggcccgcccgaccacctgctgcctccgctgggcaccccgctgcccccagactgggtgacgctggagggggactttgtgctcatgttggccatctcgcccagccacctaggcgctgacctggtggcagctccgcatgcgcgcttcgacgacggcctggtgcacctgtgctgggtgcgtagcggcatctcgcgggctgcgctgctgcgccttttcttggccatggagcgtggtagccacttcagcctgggctgtccgcagctgggctacgccgcggcccgtgccttccgcctagagccgctcacaccacgcggcgtgctcacagtggacggggagcaggtggagtatgggccgctacaggcacagatgcaccctggcatcggtacactgctcactgggcctcctggctgcccggggcgggagccctgaaactaaacaagcttggtacccgccgggggcggggcctacattccaatggggcggagcctgagctagggggtgtggcctggctgctagagttgtggtggcaggggccctggccccgtctcaggattgcgctcgctttcatgggaccagacgtgatgctggaaggtgggcgtcgtcacggttaaagagaaatgggctcgtcccgagggtagtgcctgatcaatgagggcggggcctggcgtctgatctggggccgcccttacggggcagggctcagtcctgacgcttgccacctgctcctacccggccaggatggctgagggcggagtctattttacgcgtcgcccaatgacaggacctggaatgtactggctggggtaggcctcagtgagtcggccggtcagggcccgcagcctcgccccatccactccggtgcctccatttagctggccaatcagcccaggaggggcaggttccccggggccggcgctaggatttgcactaatgttcctctccccgcgggtgggggcggggaaattcatatcccctgttcgtctcatgcgcgtcctccgtccccaatctaaaaagcaattgaaaaggtctatgcaataaaggcagtcgcttcattcctctcagaccttctgcccttcctccatccgacagcccgcgggaggactcagactccagcacttccagcagcgcctgccctctatggacgacagcccggagctgcccacgggctgcagccagtatgccagggagctgccctcttcttccacaacagctggctctggggttctcaagatttattcaggatcgtgttaacggaggcggtgggaggatagggtccctgacgtgccggggacacacacagagaaccctccccgcccccgcaagggaggggggaggctcgctttttcttaaaaatataaatgtatttatctgcattatcacgtccctggggcacccagctggccggcccgtgggccacagggcaggaagggaacagggcgtaagtctcagcaaggcggaggagagctccgccaggtggggatgtggggcagcctcacagggccccgtgctgggcctggtatcgggacagcacggcgcggtagtgggacagctcctggcgcacggccacaacttcctgccgcagcagggcgttctccttctccaggaaggccgcccgcaccgatatctggttctccttgagccgccgggcgtcacgggaccgcttggctgcctcgttgttcttgtaccgccggctccagtatttctcatcctgcaggagaagagggggagagcactgaggtccagagggacccaggtcccagcgagagaggaagggagccccagcagcggggcctaaaccacaccaggtctctgctgggataggtacccaagggtctgcctttctagggccctggttgctaaggagattgggcccctagcaacagtaaaggcatgagatagaccccccaccctcaagcaactcgcttcaagtctccactctgcaaagcggaccccagccctccccacatgataaaggcctgcatgcagttagctcttgcttgctaaggatgcttgttccctagcaacaaggccttcatggtctgagggcttctcccaatgaagagcactgccctgccctgcacattgcctttccagatcctggttgctaaggaaagcttggtgccctggtgatggggtttggtgtcccataaaatcctcgcagagctggggccttctgacctggttgccaaggcaacctcatccatccttggcaaacaaaagtgaggtctaagtggtttcaatgactgtggccagcctctgacctgctggccttgaactgaggccagagaatagcctcctccccagtaggacctgactgagagaagagctgtctcttaggaaaggggactatcctgagacctccccagaggattatacctaaagtcctcccatcctggaagttggttcctaaggaagactcctccttagtaaccaaggaccacggggctcagaaagatgctctctactccactatttaattaaagcccagttcctgcttgtgagggtaaatccagtccctagcaacagggccctctagaaggagaaaccactggtgtagatctgacttccaggccagtcctaggtgcttcaagtagctatgtgttacgcaagggtatggcaaagtcttgtttgtttttgagatggagtctcgctctgtcgttcaggctggaatgcagtggcatgatctcggctcattgcaacctccacctcccaggttcaagcgattctcctgcctcagcctcccaagtagctgggattataggtgcccgctacca[136 bp omitted]gcctcccaagtagctgggactacagatgagtgccaccatgcccagctaatttttgtatttttttgtagagacggggtttcaccatgttggccaggatggtctcctgatctcgtgatctgtccgcctcggcctcccaaagtgctgtgattacaggtgtgagacaccacacccggaacatttttgtacttttagtagaggcgaggtttcaccatgttggccaggctggtctcaaactcctgacctcaagtgatccgcccacctcagcctcctaaagtgctaggattacaggcgtgagccaacgcgcctggcccggaatgacaaagtcttgtaacagaagcccaagcaactcttgctagggaagactccagtaatggcaaaaaacaaaatcatgcaaagatgcaatgactgctcaaatcaccccaaatcagaaagtggcactggctgctaacagaagcctgaagtctcccaccagtgagaagtccaggcccaggaaacaaggcctaaaggggctggcacagtcttcatcctagccaaatgcaatcactccaaaggaagtcccacatcagagatcaaaggcctgctgagtaaggagagacaggccacaggctgatatcccattgccaaaggaagactgtcctttgcaagtgtgcctggtggagctctggacccaagtaataggagaagctccaagtctctacaagtagacctagcagagctggctgagtcagcaccccacagtgacactgtcttttgttttaagacaaggtctccctctgttgcccaggctggagtgcagtggtgtaatcttggctcactgcagcctcaatctcccaggcacaagcagtcctcccacctcagcctcccaagtggcttgtagaaatggggttttgccatgttgcccaggctggtcttgaactcccgagctcaagagatcctcctgcctcagccccctaaaatgctgggattacacgagtgaggcccctcgcccagttgacactgtctttataaacctcaggcccctgcccccttgtgccccgtggccaaggaggactaatctgtggctgcaggccaggagaggctgagcactaatcccaaggagaagcccaggcttgactgtgagaaaaggcccctccctggctgtggggcatgtctccagccaagtctatctcccacatccagctctgctcaccttctgctcctccggcacctggatttttcttgccttcttcatgattggctggggcttaagttcctcttctgagaagcgatgtcttcgagggtcaaaggtctcgtggccaggaatgcttgatagggcaagatcagctgggtcgggttcaaaggtcatcaacacctccacggtgtctgggtccacagggctgggtgtgtcccgagaggtcaggccttggggaaacagcacgtgtcagctgagtgtgtattttaaggagggggtttcctgaagctactttttgctgtggtatcatagccacatggaaagtccttctgggatctagcataaattcggccagggattaatctccctaatataaaatatgaaggttcccttggccaggcgcagtggctcacgcctgtaaccccagcagtttgggaagccgaggcggcgaatcacctttagtcaggagttcaagaccagcatggccaacatggagaaacctcatctttactaaaagtacgaaaattgcccaggtgtagtggcgggtgccggtaagcccagctactagggaggctgaggctggagaattgcttgaacccggaccctggaggtggaggttgcagtgagctgagatcataccactgcactccagcccggacaacagagcgagactccgtctccaaaataacgagaaaaatgaaggttcccctaagccataaagatgcttagagatcatggagccatatccacctttacaaacaaggaaactgagtcccagtcataactgacttgccctaggtaacacacgaatcagggctattgcttctacacttgatcttagccaaaaggccgagaagcgatggggctattgcttctaaaacctcaggacttcagatgcacagtctagcctgaatcctacttaccgaatccacgacctaagcttagaccccagactgtccagagaaaaagaatctactgcactgaaaagctctcaagttagagtctaagagctactcgctggaaagaggaggagaagctgctctaaggttccagaagattggttcgaaaggaggcgcctgtacctttaagcaccagccagccggggccagctaaggacacaggttcagggccgagtcacgtgctgacgcctgcttccctcctcctcccttcctcccaggcccccgccatcggcgccctcacgttcccccggccccgcccccctcgcgcttgaaggcgcctgcgcgaagcgcggaggagggatgggaggactcacgtggcgcaggaatgtgccgctgggaagggtagggccctggttcggcccggaggtcggacctggagcaggtgtgcccaggaatccccgacctgcagtccgtccctggagacctcaatgtgcccaaagggaaacatctttcctcttgctcttccagtcacttagttccactcaacctccaaagattcccaaccccctgctctccggggagcatcggcctcctggaccttcccagaacccccgccactgggctaccacgattctgggatcccaggcctctcctaggaatataggaagcttggccccagccccaattggaggatccagaaacaacatccctaacgttttcccttctgaagaactctgggacccggggctgcagcacgccccactgggggacccagggacctgggctgccagtctcttatgtcctgggtaaacagaattctgtgcctctcctttgcctttgcccctgtaaaggacctaggggctccagtcctatcccagttccatcgattatgggcccagattcgggggtcagtccactccccagtaaataactctggtgttccggacttccagttctggcttcacgagtatccacatcgtttgtccccaagtcccacagaaaaacccacaaaatctcattgggcaggcttcctggaatttagggttccaagtctctcctcccccatggatccattggtccctgacccattaagagacaccgaatctggccccctcccacgacacctctcgacaactggacacagaattcgaggccgcagccaggtcccacggtcccagcccccagcgtcgcacagccccgccccctgagtccaagccccgccccgtcaggacccgccccgcccccttcgccgcacctgcgcggtggccgctggcggtcccgagggcagcccgggcgggggcgtgcccaggagaggagcggggggaagccgagccgcacgaacccggccctggggagggtgcgggcgtccgcgcgggcgacggctccggcgacgggccaccggggggcggcgggctgggcgggagcccgtgctccagcaggaaggcgtccaggtctacgtactccacatcgccgaacggcagcgtgcgctcccacagcagtggcgccaacagacccggggcgggcaccggccccgggcgcccccgcggggaccctccgcccaccactgccccagccggggcatccgccgggcccgcagtctccaggcctggcccaggggttgtggctgcaggcagggccgccttgcgctccttttccttcaggagacctgcgggccgggaaagacgggttgggatgagggtgaggtgggggagatagagatggagaagagaccccgagtccgagaggcacagggcggagatccagagaaagaggggacggggggtcggagaggagagacgggagaaaaagggacggagacgcagagtgggagagagacccagaaagaatggagacgggggtggcagagacaggtggacagattcacagagatggggacagaatgccgggaaggaatagacacacagaaagacagcgaaccagagaaagagagacggaagttcaggaataggggggcagggacagggtaggtggagggttgggcaggtgagagaaaaaatgacagctctgtaatttcactgtaattacccaacccccatcccctgcgcgctgtacccccttcccctcccccaccatctgtaaggggcaggaaggggctctattcctggggcacatccctcatccctagactccatgtgaccccatgacgccccgcccaagcccgtgtcaccaccgtgtgagcacccgacacaccccctccctgggaccccaggggtccagactcccggaccaaaaggaagaggaggctggggcctacactcttgtgaactaagcggggaggacgttggggacgttggtgcctgggtccttagggtggacgggcttcagagccggcgcttttgggtcctgggcgctaagggatctaggggcctaaacacctgagtaattgagtagattaaggttgggaagatggactccccgcacgcaggtttctatgggaccccaccccacggcacctgagtccctaagggggtagggtgtccgaagtgggtgagatgggggttagaactcacagctggccggctctttgggcttgctggtcccctgcagaaggctccgcaacccaagcagcgctcccccgccagggggtgtcccggccgggccgcccagcagcagaggggccggggtcctgtcgctcacaggccgcgccatcgcctggcacctgcccccaggctcacgggttcatggagaggcgaagggctggcctgccagtcaccagcacactccagtggtttggacgagtgtctgcccaggggcgggcgagtgtagcctgcaaccctccagtatccagaacgctgcaaatcctaggagcgacggggatttgaggtcctcggtgcagaaacgtgcaactcaagagggtcccgggagatcatgcaatctgggcgagggggtgtccagatcaagcggtcggctctttgcaaccgagggtgagaggggactcaaggcgctccttctacaaggtgggcgagcctggctcttgcaaaatctgcagctctcgcaacggaaggcgctttgcaatctgcaccgagaggtgtgcgcggaggggcggaggagggggcaggaggaggcggccgccttgaggcgtggccaaagcaaacttctttcgcggaaaaaaaaatccaaaccaaaacacccgacgccacagcgcgcgcccctcctccgggtccccgcccggcgcgtccagccccgccagcctctatgggcatgcaacccagccgcgtgcctccctccggctgcaaacacggaccaatcgtctccgacaccttgagacgcacagccaatggggcctctgggtccgccagggcccaggagggcgcgtgaggggctcagcgcgtgaagttgccttgcctttcggtgggaggcgggacactgacctacatttgcccaatgggaggcggtactggggggcgggaccgtgacccagtttgggccaatgaggcaggcgggagggggaagcacatggctctgctcgtgctgcctgatggcgaggggggtgatggggggaaaaggggcgccgcttaaaggggccgcggtcctaaagatggttttgagaagcaggaagccaaaataccgagagcggaggtttagaaagaggaagattggtttccggaagaagtctgttctttaatacccaaatgtttccccaccgcgcctagaatcagaccactgagaaaacaggaagtattctgtccctttaatagctttgttttaggggtaactcccctcgccttgtggggaggcttaggacgggcgggtgcaatcctcgaaggggagtctcagcgaccatgggggacaccatccactgtaagacagagaacaacggcagggggcgtcagtataggatggaaggggcggggggtgtgcagggggcgtgggctgcgccgcgctgggccctaccgtcggaagtctgcgagcggggaaccagaatgtactaggtcgagaagcactgggctgaaccacaagaagccaataggaggggggaatcgggacgtccagattcagcagtaggctgaactacttgaaggtcttcatgggggggggggggtgtggactgtaccatgttgcgaagccgggggtgtgtgagattcctgggctaaaccacagggaggcagaggtggagggaaggggttgtaccttgtagattctcagtaagggggaagggagcatcagattgtggaacagcgtaaggtagtacgacttggaaagggagagaggatccaaattgtaccattttggaaattcacagtaataggaagcacagaacagtaggtaattggaccataggaaggcaggggtcaagggttatagaccaagttacaaagcagtgaagaggaaagacaaatcgtgggctagcaatggcctagggctggcaggtggactgtaccacatagacatgtagggaaagagagaaaaagagacagctcacgaggctagaccatatagacgcaggaaggaggatgggactgaatcacactgagacaccaaggggagacacatataagagggttagcccaagacttagagggggtgcagactggaccataccatgcaggcggtagttggggcctcggcagcgcctctcggggtgccgggggtccctgttgcccctcagtgccctgtgggccaagggctgcaggggccggctgttaccgctgaggctctggaagatctgagatggaggattctggctcaggagtctcagggagtgcatctgcagtggaaggagggtgggaaactgggagtgaatagtgaatggtcttggtgacgtcacgcaggaaaccccgcccctgggagcaggtgggcggggtctgttctcagccccacccacccccaaggtggtctgaccctcttacctacttgagttcagtctatgaggagagggagggcaggtgagcaaggggatgcccaggccagtgagtggagtacccaggcctaggaagggcggtgcggacagagggtcacctgaagggaggtgatattgagggcccggtcaatgaggatccaggtgacagtctcggagcagggcggggtgctgagagagccctgataggtgatgaagccgaaggattcagggaacaggagctccaggctcaggtcttgaagaaagtaggcatcatctgcgggaatatcaggccagagtaaagagggatggcactcttgaaccccctcgtgtgtgaccactgcccccagcacgccagggacttactcttgtaggagatgcgagtgatggtgtcgcggttaaggaggcgactgaggaatgggttagaggtactggcaacctgtgtgggggtacgaggtgaggacacaggagcccagaagtccaagccctcaaccttctcctcccccaggacccaggagtctgggcctcccagcaccccgcttccctcagaccccgggttccaggcacccaactgctccctccctctgaatctcgcctccgctcacgttgacaaagaggctgagaatggccaggccattggggccgcgggaggcagcgctgaaattcccgtagagttcctggttgaagtgaatgagctgcacctgggggtagcacagagcatggggtcccccagcagaaggggaggagagcatgaccccagctttgggggcccgaatcaggctgaggattagtgcttagggtgggaggccagttctgtggaggaggatggggtgagacactaagagggtgaggtgggaggaattggggtgactcagggcggagggtggcgggtaaacaatcagtggccactacctcagcagagaagccctggtggttgatctgatgttccgagccggctccgtcgcgagctccaaacagcagccgcagttcactgagtcggtggctgtaaaggaggggacctccagacacattgaccacaggtcggggtgcaggcaggaaggagacatgtcggccggtgttgtacaaggttccccggagctgtgggagaggcgggagctgtcagggggcagggagagatcttttatctctcgtttcccacgcctacattttctgattccaacagtcttttttttttttttttttttttttgaaacggagtctcgctcttgttgcccaggctggagtgcagtggcgtgatctcggctcaccgcaacctccgcctcccgggttcaagcgattctcctgcctcagccttccgagtagctgggattacaggcatgcgccaccatgcccggctaattttttatttttagtagagacagggtttctccacg[142 bp omitted]ggttggagtgcagtggcgagagctccgctcactgcaagctccgcctcccgggttcacgccattctcctgcctcagcctccagagtggctgggactacaggcgcccgccaccacacccggctaattttttgtatttttaatagagacggggtttcaccgtgttaaccaggatggtctggatctccggacctcgtgatccgcccgcctcagcctcccaaagtgctgggattacaggcatgagccaccgcgcccggctttttgtttttgttttttttttttttaaatagaatctcactctgctgccgaggctggagtgcagtggtgagatctcgcctcactgcaacctctgactcctgggttcaagcgattctcctccctcaggctcccgagtagctgggactacaggtgtgtgccaccacacccagccaatttttgtatttttagtagagacagggtttcactgtgttggccaggctggtctcaaactcctgacctcaggtgttctgcccaccttggcctcccaaagtgctggggttacaggcgtgagccaccgtgcctggcctccaacagtaatttaatcattcaacataatttgaacactgaccactttccaggctctgtgccagtttgtaagttggtgcccaatattggtgaatttgtttgattaacaaatattgactgagctggtgctatgtgccgtggatgcaagaatagagcaataaacaagtagacaaaagtcctgggccttatggagtttatgttctaatgaaggcaagacagacaattgtgaatcacataagtaactgcttaattaactacatcctgagctcatgtttgggggaactgggagctctgaggtgtcatggggagctcagcttagatgggggatgtcaggaaaagcttccctgcaaaggtgacattttatttttatttatttattattttgagacaaagtctcattctggcacccaggctagattgcagtggtgccatcacagctcactgcagcctcaaactcttgggctcaaacgatcctcctgcctcagcctctcaagtagctgggaccacagtcacataccaccatgcccaactaattttcaattttcttttttttttttttttttttttggtagagagggttctccctatgttgcccaggctggtcttaaattcctgggctcaagtcatcatcctgccttagcctctgaaaaatactggaattacacgcatgaagcactgcacctggccaaaggtgacattttaatggggacctgaaggataagcaggggtgacttgcaaaagaacaaagagaagggcattccaagaagagggaacagcaagtgcaaaggccctgaggtggcctgtttgagtaacagcaaagagacttcatcaaagtccagtgaacagaggagagagaggttatgggggctgaatggtgcaggaccttgtggaaaacagtagagagttttgtatttttatttaaataaactgcatatataggctggatgtggtggctcacgcctgtaatcccagcacttcgggaagctgaggtgggcagatcaccagaggtcaggagtttgagaccagcctggccaacatggtgaaaccccatctctactaaaaatacaaaaaccagctgggtgtggcggtgggcgcctgtaatcccagctacttgggaggctgaggcaggagaatcgcttgatcctaggaggcggaggttgcagtgatctgagatcattccattacactccagcctgggcgacagagcgagactccgactcaaaaaataaaataaaataaaaataaataaactgcatatatataacacatttgccagaatgccaaacatatagtaagtgctatgtaaatgtttgctgttattacatatcctaataggaggattttgagcaggagtgatatgatcttatttgtgttttaaacatctctctagctgtggggtgaatagattgcaggaagttgagaggcaggccagtgaggagggtacgccaccagtccaggtgggagatgatggtgcctacatgagactgggggcagtagagggcgtgataggtgaaaggatttgaataatatttagcagcaaggctagaaagaacatggattggaaatggacatgagggagagaggataggatggggaatggctttgaggcttttggctggggcagctaaatgaaaggcagtgccggctcttataagaaatggtattggccaggcgcggtggatcacagctgtaattccagtaccttgggaagccaaggcaaggaggatcacttgaacccaggagttcgacatcagcctggacaacatagtgagaccccacctctacaaaaaacttaaaaagttagccaagcatactggcatgtgcctgcagtcctggcttcttccttcctttccttccttcccttccttccttccttctctctttctctctttctttctcgctctctctctttcttttctctccctctctctctgtatttatttctttctgagatggagtcttgttctgtcacccaggctggagtccagtggcgtgatgtcagctcactgcaacctccgcctcccgggttcaagcaattctcctgcctcagcctctcaagtagctgggattacaggcacatgccaccacacccggctaatttttgtatttttagtagagatggggtttcaccatgttggccaggctgatctcgaactcctaacctcgtgatccacccacctcggcctcccgaagtgctggggttacaggcatgaaccaccacacccaggcatgtcctagctatttttgaggctgaggtaggaagatcacttgggcccaggaatttgaggttacagtgagctatgactgggccactgcactccagcctgggtcacagagtgagatcccaattccaaaaaaaaaaaaaaaaagtatggttcccagcatggtactataaagcaggtcccagcattcatgctacgctgcttggtttgaatgccagtgctggctctctgtgtgatcctaggcaagtaacttaacctctgtgtgtcagtttctgcatgtatataataaggttaataattgtacccattttggctggacgcagtggctcatgcctgtaatcctagcactttgggaggccgaggcaggtggatcacctgaggtcaggagttcaagaccagcctgaccaaaatggagaaaacccatctctgctaaaaatacaaaaaattagctgggcgtgatggtgcgcatgcctgtaatcccaactactcgggaggctggggcaggagaatcgcttgaacctgggaggtggaggttgcagtgagctgagatcacatcattgcactccagcctgggcaacaagagcaaaactccatctcaaaataataataataataataacaataataataattgtacccattttgtggggtggttatgagatgagaggcttatcaaggttttaaatctgcctggcacaggaaatgttctgcttttcattgcttctgcagagatggggagactaggggaccatgcttgggatgggaagaatgggtgatccattttacagtgtaagcagcctcctctccacccactgggtgtcccctcctcccccaaggctgctctcctacctcagcaccccattccccagcctctattcatgcccatccccagtgggttcaatagctcctccctccaagccccttaccttctctcctccagtgctgagccttaatgggggcagaaaggggtcataaagaaccctcttcagctccacatccacggggctctgccgcttccccacagcacacagactccacgctgcattcaccaggccccagaaaggaggccctgggggtggggtcggagtaggaggacaaggagtcagaaatagagactggatcccagggctggtatctgctgagtgggctgtggtctggactcccagatcccaggggaggaggggctagggacctagactcctgggtctgagggaggactgggctcagatccagaattctgggtcctagaagaatcttggaatagtttccaagtttagcagagacgggtttcaccaagttggccaggctggtcttgaactcctgaccacaggtaatccacccacctcggcctcctaaagtgctgggatttcaagcgtgagccaccgcgcccagccgatcaaacccatcttaagccactgtagatggaactacaactcccagcaggccccagtgctaccagcctacccctctgctgcctacctgccccagagccccgtgggagttgtagttcttttttttaatcgctcttatcccacagctggattattattaatgtgttggggagaggagctgcaagagaaggctggacaaggtgggggacggggccacccagcctctggttcctagcaggagccaggaccttcctctcccggcaaacacacacataatctccacccccacactttccttccactcactcccactcactacttgaaatgcgcatgtataatgtcccatggtgagcccctggggttcagaagctggcccgactcctgagggacagaggagggggctgggactcctggtcctgggggggaggagggagctgggaacccaggttcctgagtctgaagaaggaggcgccgggagggccggactcctgggtccccgccttggcggcacctggcacgaagtttccctggagattatccttgtagctccaccagtcctcggggtcaggtgctggtccgatgtgagctgggaagagagcagcctgaatccctctccttggcatccccacctccaccctccctcgggggctcctcccgggaaccccaggtcttacctgctgcccccagtgcagcccagagtaccagcgctcgaggggcgctcagacgagctgcagcccccatccccaggaggcctccgagggacccctgcccaacgccctgcccccctctctcagctcctctgtcccctccttctgggaccctgtccctccaggacttccagctttcctctcctccccacagggagtcccagttccccaaatgccaaagcagccagggactgagatccgcccttcaaacccactcttcttctctctcccgtctctctgtgtctttcctctttcctctgctcttttcccggaaccctccagtctccctctagctcctgatcttcctactcctctcagccttctgctgcccccagggctacctcttggttcctaacccacacctcctctccgttctcttttcattaagctctcccaagccacctaactccaggtctccatcccgcatctcctcctcctcctccctctctcctttccagctcctgcctcttctcccctctctccttcttcacctcctcccgccctccctcagtgtcggcctccagcttcgtgctctccccacctcctcctctcctgcctcttctccctgtttcagtctctcttctctcttgtcccttcctccctcctccccctccctctctcctctcccgtggtgttatttaattttgttgttgggctgggggagcaggtgatctcatagcggcaaacactcctcgggttggcttggggtgggatgtgcgaaagggcaggattcggaaggaggtagggggctggtcctcggctcccagccgcgctggggccacgcgggcgggggtggccgggacacctggggccgggagcaggctgtttccatcctccgcagcaaggggaagggggggcgcttaaggtggagctgggagtggcttcggaagtctccatgctgggggccgccggccttggcggatgcagggtccccctgctcgctgggacccaggttggagccgccccagcgcccgcagccccccttccccgccccagggctccactgggtctctgcctggggctgccttaacggggccgggggatcccctaggagcctgaagtgcagtgagggctgctcgcctggagggggaggcagagacctggcgagggagagaggggcggggaggaggagccgggagggcagaggcggagagcgggaggtgaggacccacatctgcgtaggctggggaggggaagggagcctgagatggatacggagaggaagggcggagggacagaaggttagagaggcaagaacaaaccgccaggcaggagtgaggaggagggggaggaggtgaaggaggagggggaggagggagaggagggggagggagaggagggggaggagggagaggaggagggggagggagagaggaaggaatgaatgagagagatacagatagaggcagaaaaggagatacagagacgcagcgagacagacatggagacatagagacacacacttagagatagacagaaactcagagaccaagcagcagatggggtggggagagacaaaaagagagaaagagcgatccaaagacagagagagacaccacatttttgtatttggggagaagagatggggtcatgctatgttgctcaggctagtctcaaactcctgtcctcaagggatcctcccaccttggcctcccaaagcattgagattacaggcatgaacaaccatacccagcctcagagagaccacatattactgttgttgttgttatttattatttttcaccccgtctaatggtagtgaaactgctcattgtcttcttttattttcttttttgagacaagccttgcaatgtcacccaggctggagagcagtggtgcgatcatggcttgatccagcctcgacctcctgggcttaaacactccttccacctcagcctcccaaatagttgggactacaggcacatgccaccatgccaggctaatttttaaaaattattttttgtagagatgtagtcttgctatgatgcccaggctggtccggaacccctgggctcaagggatcctcctgccttggcctcccaaagtgctgggattacaggtgtgagccaccttgtccagcctgacaccaaacattaacgagacagagagacatagaaagagacacacatacatcagtacaggtggagagagacacagagagggagagacatagaaacacacacacagactgagcatggtggctcacacctgtaatcccagaactctgggaggtcaaggtggatggatcacttgaggccaggagactgagaccagcccggccaacatggccaaatgccatctctactaaatacataaaaacttagccaggcatggtggctcacgcctgtaatcccagcacttagggtggtcgaggtgggtggatcacctgaggtcaggagttcaagaccagcctgaccaaaatggtgcaaccccgtttctactaaaaaatacaaaaactagctgagcgtggtggcacacacctataatcccggctactcaggaggctgagacaggagaatcgcttgaaccgggtaggtggaggctacagtgagccgagatcccaacagtgcactccagcctgggcaacagagtgagactccatctcaaaaaaaaaaaaaaaaagaaagaaagaaagaaacacacacacagagctagagacagagacctgggaacaggcacacacacatctataaatagagacactcgtgcagagaaagagacatcaacagagaggaacagatggacagagatagagagacccagatagagggagagaggaccagaagcagaccaactgacatgatgggagagactacaaaggaatcagaaagacagaggtattcagagatagcaaattgggatggacattcaaagacctagagatggagagagacacccagaaagaaacccagagagtcaggggtggagagagacacgaagaaaaaacacaagaaggaaaggtacatactaataatttattgctggcggggcttggtggttcatgcctgtaatcccagcactttgggaggctgaggagggaggatcacttgagatcaagagtttgagaccagcctgggcaacatagtaagacctcgtctctattttttatgaaaaagaaaaaaacaggccgggcacagtggctcacacctgtaatcctagcactttgggaagctgaagcgggcggatcacgaggtcaggagattgagaccacggtgaaaccccatctctactaaaaatacaaaaaattagccgggcgcggtggcgggcgcctgtagtcccagctcctcgggaggctgaggc[138 bp omitted]ggggaacggcagctcacgcctgtaattccagcactttgggaggccgaggaaggcagatcacttgaggtcaggagtttgagaccagcctgaccaa[137 bp omitted]ggtgaaaccgtgtc[131 bp omitted]gtgtggtgacgcatgcctctagtcccagctgctcgggaggatgaggcatgagaatcacttgaactcaggaagtggaggttgcagtgagccgagatcacaccagtgccctccagcctgggcaaagagtgagactgtctcaaaaacaacgacaaaacaaaacaaaacaacgacaaaaaaatctgttgttgtgtgacaaattaccctaaaactcagtggcttaaaacaacaaacatttattgtgttcacagttcctgagggccaggaatgtgggaatggcttcattgggtggttctggatccttcttgagggtgcagtgaaactgttggacagggctgcagtcatctcaagtcttttatgacctagtctcccaaagtcacacaccttttattccacgcatcagaaatgagtcactagatcta[144 bp omitted]tgaaacctcgtctctattaaaaatacaaaaattggccgggcgtgttggctcacgcttgtaatcccagca[134 bp omitted]gaggcaagagaatggcgtgaacccaggaggcggagcttgcagtgagctgagatcgcgccactgcactccagcctgggtgacagagcaagactgtctcaaaaaaaaaaaaaatacaaaaattagccgagcatggtggcgtgtgcctgtaatcccagctactcaggaggttgaggcaggagaatcgcttgaagctgggaggcagaggttgcagtgagccaatatcgagccattgcattccagcctgggcgacagaatgagaccctgtctaaaaaaaaaaaaaaaaatcctttgctcttgaaaggaaacgtatcacagaatttggggattaattttcaaaccaccacaggtggggagaggaagagagacacagagttgtggagagatggacccttaaagacttgggaggggccgggtgcagtggcttatatctgtaattccagtgctttgggaagctgaggcaggaggatcacttgagcccaggagtttgagaccagcctggacaacacaatgagaacccatctcagcaaaaaaaaaaaaaaaaattttttttttttgagacagagtctagcaccattaccgagactggagtgcagtgatgcaatctcagctcactgcagcctctgcctcctgggttcaagcgattctcccgcctcagcctcccaagtagctaggattacaggagcctgccaccaagcctggctaatattttgtatttttagtagagacagggtttcactatgttggccaggctggtctcgaactcctgacctcatgatccttctgcctcggtctcccaaaatgctgggattacaggtgtgagccaccgtgcctggcctctgcaaaaaattttaaaaaccttgtcaggcatggcagtgcacagttgtagtcccagctacttgggaggctgaggtgaaaggatgacttgagctcaggaggtcgaggctgcagtgagccaagatcacagcattgtactccagcctgggcaacacagcaagacactatctccaacaacaacaaaaaagttaaggatcttgagacgcaatcatcctgcattatctgggtagactctaaatccaatgacaaatgtccttataagagaaaaaaagccatagggagattgggagaaggccgtgtgaagatcgaggcagaggttggaatgaggcagccacaagccaaggaatgccaggagccaccaggagctggaagaggcatgaaacattcgcccctggagtctgtggagggagtatggccttgccaacaccttcattttggacttctgaccccgagagctgtgagacaatacatttctgttgtgataagccatcatgtttgtggtcattttttgtgacagccagcctggggctggggagaaattaagacatggaacctggctgggcgcgatgattcacacctgcaatcccagcactttgggaggctgaggcaggcggactgcttgggctcaggagttcgagaccagcctgggcaacatggcgaaactccatctctatttgtatttagtaaaatttaaaaagaaagaaagaaagaaagacatggagtccgacagaggcagaggcaatgaaggaactagagctatacagaaagtgaaaggctgactgatactgcaagaagagcagactctacctaaaatgtagggctttcctcctccaggaagccttccctgaccgcccccccccccccaggctgggtcagtgcttgctgtgaacattcacaatgtcctgtgctacctccatgagagcatacatcttgttagaaagggactgtgtccccatgtgttccaccggagggcccaagcctgacccgtctctgagtccccagcctcactgcacacagagcctggtgtacggggtcctcaggagagaactcaggcattattgaatgaaaccatgctcatgatgtctttccctggagagtctgccagttcccatgtgcctgggtgacactcgggttttctgcagtgcccatggagggccttgcctcctccaggacgtcttccctgaactgcaagacatggccaggtgcctcttctaggctcccacagtgccctgcgctgcctccattgttgaatatcctaccaaatctcattgtaccaaggtctccctcctaccccaccctcccagactaggcaagtccctagtccgactcaggtcagggtgtcagaattttccagggagaccacaggagaatatgttgaatgaataaataagtgagtgaatgaaataaaaacacagggactgtggcactgagagacaggtgagaaaataatgtttttgtatagggcttaagaggaaggctttggccgggtgtggctcccgcctgtaatcccagcactttgggaggctg[133 bp omitted]gctgaggcaggagaacctgtgaggcagagcttgcagtgagccgagatagcgccactgcactccagcctgggtgacagagcgagattttgtctttaaaaaaaaaaaaaaaaaaaaaaaaaagaggaaggcttcctggtcctggtgtgatctggtgtgttagaacatttgactttcttttttttttttttttttttttttgtgaggcagagtcattctgtcacccaggctggagcacagtggtggcagagtctcatgatctcagctcactgtaacctccaccttagggttcaagcgattctcctgcctcagtctcccaagtagctgggattacaggggcccaccaccacgcccagctaatctttgtatttttagtagagacggagtttcaccatgttggccaggctggtcgctggtcttgaattcctgacctcaggttatctgcccaccttggcctcccaaagtgctgggattacaggtgtgagtcaccgtgcctggccaacatttaacttcctgactatctccataatcctaaccagtgctcaggatgcatcttttcccctcaagtcctccccacagcctccttctcagcttctcccccttccagtttccctccccttgcaatccatgccccacagatcccagagggttttatttttatttttatttttttttgagatggggttttgctttgtcacccaggctggaatgcaatggcgtgatcacagctcactgcaacctcaacttcctgggttcaagtgatcctctcatctcaacctcccaagtagctggtactacaggtgtgtgccaccacacccagctattttttaatttttctttttaaactgtatttacttatttatttatttatttaaacagggtcttgctctgtcacccaggctggagtgcagtgatgtgatcatagctcactcccaggctccagggatcctcttgcctcagcctcccaagtagctggggccacaggtgcatatcacacacccagctaatttctgtttttttgttttgttttgtttttgtttttgtagagacaaggtttcaccgtattgcccacactagtaattttttttttttttttttttgagacagggtttcgatcttgttgcccaggctggagtgcaatggtacgatatcggcttgccgcaacctccgccttctgggttcaagcgattctcctgcctcagcctcccgagtagctgggattacagacatgcgccaccacacccggctgatttcgtatttttagtagagacaggatttctccatgttggtcaggctggtctcgaactcctgacctcaggtgatccgcccgccttggccttccaaagtgctaggattataggcgtgagccaccgcgccaggccaacacactagtcattttttatttttttgtagcgatagaggtctcactatgctggctgggctggtcttgaactcctggcctcaagcagtcctcccaccttggcctcccaaagtgctgggattacaggcgagagccaccctgagtggttgtgttacattcagagtggaccctgcctctcccacggctcccctgcacctctggacagagtccccctcctcagcctttcttgtcgtgaccagattcttctaatgtccttgaagatccacctgtgagagaagttttctgacctgtaggctgggtttggggtactctctgggctcccccagtgagctgagccacctcaatgatgatgatgattgcccgtatcactctgttttaacacggtttgtctctcacacaaagctgattctgcccctcccctgctcacagacctcccatggctcctcagtgccctgggggaaaaaaacccaggtcctcagcctggtctgagagaacccacatgccctggccacccccagtccccagcctcatctcttctctcaccacagagacctcctgccctgggatctttgccaaactgtttcctctaactgggctccctttctcccttctctgctgggcaaattcctactcagacttctgcacacttcaggagtcccctcctccaagaagccatctggcaatgccacgaggtgggcaggggcctcctcagagctctggaagccacctgtgctgcctccattatagcgcaaagacagactgggctcggtgcccagagggggagggaacgaccaggccggaggtgggtcccagatgtggatttcatgcctattcgtctcgggtgctgggaacaaagtttgggtcatgaggaacatatggggcctgctctgcaccatgctttcatctcctatctccccagcccctgagtgggaggcggcagcgccaggcctctacaggcctgggtggttcccacagcccctcttggcctcctcactgctatctctttgccttcaactcccactgcccctgggagcctagaaaaatcctccttgatctatactctcgccttctgggttccagtctcctggaggaggtgtggactgtggactctgggtgtttaaattttatatatatatatatatatatatagagagagagagagagagagagagagaaagaaagaaagagagagagagagagagacaagagtcttgctctgttgccaggctggagtgcagtggcgcaattttggctcactgcaacctccacctcctgggttcaagcgattctcctgcctcagcctctagagtagctgggactacagctgtgcaccaccatgcctagctaatttttcttctttttctttctttcttttttttttttttttttgttgttgttgagaagaagtcttgctctgtcgcccaggctggagtgtagtggtgtgatctcagctcactgcaacccacctcccaggttcaagcaattctcctgtctcagcctcccgaggagctgggactacaggcgcacgccaccacacccagctactttttgtatttttagtagagacagggtttcaccatgttggtgaggctggtctcgaactcctgacctcaggtgatctgcccacctcggccctccaaagtgctaggattacaggcatgaaccaccgtgcccagcctattttttctgtgtttagtagagacggggtttcaccat[132 bp omitted]cagtggctcacgcctggtgatgggattacccagcactttgggaggctgaggcaagaggattgcttgagctcaggagttcaaagccagcctgggcaacagcaaaaccttgcctctatttaaaaaaaaataaaaacaaaaaaaaacctagcctggtggcttgcgcctgtagtcctagctacttgggaggctgaggcaggaggatcccttgagcctgggaggttgaggctgcattgggctgcaattgtgtcactgcattcctgcctggaagacagagtgagaccctatctcaaaataaataaataaataataaactcatacagctgtcagtctgcactaggcactgttctaagcccattatatatattaactcatttaatcctcaaaacgtaccctgtagattattttctattattttattatcatcctcatattatagatgagaaaactgagcgatgtggctcagcagggctgggatttgtggttttgttgtttgttttttgttttttttttttttgagatggggtctcgctgtgttgcccaagctggagagcagtggcatgatctcggctcactgcaacctccacctcctcgatccaagcgattctcctgcctcagcctcccgagtagctgggattacaggtgtgcaccaccgggcctggctaattttggggggatttttttgtttttgttttgttttgtttttttctgttttttgtttgtttgttttggctttttgtttgtttttttctgtctagcggaggttgcagtgagccgagatcatgccactatactccagcctgggcaacagagcgagaatgtctcaaaacaaacaaacaaacaagagaccttgagatggggaagagattattctggattatctgggtggccccatctcccatccaagaactaacagggtctgaccctgcttagcttctgagatcagacaagatcgggttcattcagggtggtatggcggtagaccgggtgcccctcgtctaattacaggagtccttaaaagcagagaacctttcccagccatggtcagaaagagatgtgaggatagaagaggcaggaaaaatctgaaatgtgaaagggactcgacctgtcgtggttggccgtgaagatggaaaaaggggtcatgaatcaggcaatgtgggtggcctctagaaactgggaatagaaaggaaacagattctctcttagaggctccagatggaatgcagcctcgttagcaccttgattttagcccagtgaaacccatgtgaggcttttgatctgtagcgtgtaagatgataaatttgtgttgtttcagctgctgagtttatggtaatttgttatggcagtaacaggaaaggaattcgacagttctctgttactgagcacgtgagggaattctacgtccccaccttcatacaactgagtggaaccacatgagtaatcccgatgaatgagctgtgattggaagggccgggagtcgttcctggaccaaagctgttttgcttgcataagaccattcagtgcttttcctctttccttgtctcagtgatcaaggatgccctgggttacgggtggtgctacaaggtggtgaacatctctcagcctgggtccttgactgtgtggaaaaccaacctttgccaacttgcatggaacatgtatatgaacaagaaagaaactttgtgttttctttttctttttcttttctttctttcttcttcttcttttttttttttttttttttttgagacaaggtcttgctctgtcaaccagtttggagtattgtggcccaatcatagttccctgcagtctggacctcctggactcaaacaattctcctgcctcagcctcccaagtatgaggactacaggcaggcacacaccacaatgcccagctaatttttgtattttttgtagagatggagtatcaccatggtgcccacgctggtctagacctgggctcaagtgatcaccagcctcagcctcctaaagtgctgagattacaggcatgagccaccacacccagccagaactcaataaactccatagagccaacagagctagcctaagctgcctaatggaaggtctcaatgaagtaaggaaactggcttgccataacatgaaaaggtgtgttccaggaagagaacagcaagtgcaaaggtcctggagcagagtgtgcttttttttttcctttgagacggagtcttgctctattgcccaggctggagtgcagtggtgtgatctcagctcactgcaagccccacctccctggttcacgccattctcctgcctcagcctccagagtagctgggactacaggcgcccatcacc[186 bp omitted]ggctgcagtgatgtgaatgaggaagacttataagaggtgaggtcggtgatgtggtggaggtagatcatgcagggctttgtggggcagggcagggactttgggttttattttgagagtgatgggaagccattcaagagtttattttttgtgttttgttttttgtttttttctgcattaaaaaatgcagaagaaaaaaaagagtttatttttagcgatggggtctcactctgttgcccaggttggagtgcggtgccacgatcatagctcactgcagcctccgactcctggattcaagcaatcctctgcctcagcctcccaagtagctgggactacaggtatgcaccaccatgtccagctaattttttttttttttttgtagagatggggttttgctatgttaccacgtttgctggtcttgaactcctggcttcaagtgattcccacctcagcttcccaaagtgctggggttaccggcatgagccaccatgtctgtcctgacatgatttaaagtgatcatcctggcttccatgtgaagaagactttcagggggtagtgatgagagtagtgtggggactattgtaataatccggacgagcagtgatggtggtttggacaaaggtggtagcaacagagatggtaaaaatggttgaattatgggagatattttgtggatgtggacaggatttgctcatggattggatatgaaggtggagtatgggggcagtgaatgcccaactgaattggcttcaagagaggatgaaaataacaaagataaggaatatagt[134 bp omitted]catggggaaacccgtctctactaaaaatacaaaaattagccgagcatggtggctcgtgcctgtgatcccagctactcaggagactgaggcaggagaatcgcttgaacctgggaggcggagactgcagtgagccaagatcactccactgcactccagcctgggtgacacagtgagactccatctcagaaaaaaaaaaaaaaaagaaagaaagaaaagaaagaaaagaaaagaaaagaaaatcccttaagactggtcgcagttgctcatgcctgtaatcccaacgctttgggaggctgaggcaggaggattgcttgagctcagggggtcgagaccagcctgggcatcatagtgagaccccatctctactaaaaaagaaaagaaaagaaaatcccttaaaagactcctacttcagagatgaccccaccctgggttcatcgggaggctaagggcaggttctcccagattatgtaacattttattggtggcatgggggtcaaatagtctccctggaggcaatttcttgcctttttccatctaaccaagagcaaacccagaacgtttgctggaaggcacctttctccctacctggtatcctgtgacatcatggcatatcctgactccccattggctgagaggcccagctttctctcagagaaggaaattattaggcaacacaaatctgactagcacccagttacatcataggagtgtgcttattgtattggccactttgttccaggtccaaatggacctcaggacagcgcggtggctcacgcctataaacccaccactttggcaggccaaggtggaaggatcacttgagcccaggagttcgagaccagcctgggcaacatagcgagacctcgtctctaccaacaacaaaattagccaggcatggtggcctgcgcctgtggtcccggctacttgagaggctgaggtgggaggattgcttgagcccagtaggtcaaggctgcagtgagctaccatagagccactgcactccagcctgggcaacagagtgagacccagtctcaaaaaactaaataattaaaataaaataaaataaaaaattttggctgggcacagtggcttatgcctgtaatcccagcactttgggaggcctaggtgggcggatcacctgaggtcaggagttcgagaccagcctgagcaatgtggtgaaaccccatctctactaaaaatacaaaattagccaggcgtggtggcacgcacctgtagtcccagctatttgggaggctgaggcaggagaactgcttgaaccggggaggtggaggttgcagtgagccgagatcatgccattgcactccagcctgggcaacaagagcaaaactccatctcaaaaaaataagtaagtaaatataactataaataaaataatttttttaaaaaagagttagaaacaaacaaatggaccttaaatcacatcccttcctctaagactccctgagtaccccctcagtgactctcctgaaaagatcacccaaatttgagattatgttgtttgctgtgggtgcaggggcaggggtcagggtggcaaggaaggtcccaggctgtggcaaccttccattccgtggtacttaccgcttcctgccttttgcgcccctcccctctggcgtgcaggccaattgttgagtgggaatacaattctgcttagcaccaagttatgtcataccactctgtggcttccgattggctattctttcaaaaatgagtcactcaaagtatctcaattcctttctcagagcctatcctgaggcccatcagaaaccaacagttcctacgtctggaattttctagaaatctggaactgctgtccctccctttgtgagatttcccgccttttccaaccaagccccgcccattggccttcggcctatcgtcaggcaacaccaatctgactagcacccaatgacgtcataagagcgttcttattggattggccactttgtcagggtcccgttgtgctgtggtcctaacttcagctccgcgtattgattcaaggccttgttcgcttccctctagagagtgtgccagcatcgatcaggggtctgtagacaaaaattcccaaagatttgagactttattgggggaaacagatcactggcggggaataagccacaggccaaaggaggaaatgttgggaccagaagtcccgcttgccgccttttgctaaaagttccgcacgcctgctcggcgtgggcgcaagcatagtgtcgtcggggctctgcgacgtctgattggctctctgcagtgcaccgtcgaggtagaaggctcagctcctagtcgctcccaaattactttgttggtgctcgaggcagccccatctcacgtctagtgctccggcctgggactgggtgtgggtgcccgcacgccgcggcagcctccggcgcgctcctcctgctgcagccgcttcaggggccgggcccagcgcggcctccatggcagcgcgaggccgtggcggtcgaggatgaggcgcgtggggtcggggtcgcccacggcgctgcccagcagcaggtagtcggtgcctggctgcaggcgcaggcagccgcaggtcaggtcggcgcggggcacccaggcgtcctggtcgccgcgtcgcacgggctgcgcccgctgcttgtaaacggccagcacgcgcacggccagccgctgccatgccgggcccgccgcctcggacgctagcacctgcgcgcggagaactgtggggaggggagatgtcagcccaggtcgtggggagcttccagggtacctctgggtcccgtggggtcagtcacagtgggcaggagcccgagaccggtgggtgggcttctggtatcgcagtggggagagaaaccttgaaccttggagagtttgaccctaaatcgtgaggggtagagcctgctggaggaaacatctttgagataaggagttaaactatagtaggtggggctggggacagggcagaagaggcaggtccagggtctctaatgcagtggagtcagaaggtatcaatggtggaattcttgggaaggaggggtcacattgccgggggaggggctctgggataaatttcgaggaccagaagaaggaagagactggtccctggaatgtgagggctgaggtcatactgatagtgattcagaaaaacataaattttttttttgagacggaatcttactctattgcccagtctggagtgcagtggtgtgatctcaactcactgcagcctctgcctcccaggttgaagtgattcttgtgcctcagctgggtttacaggatcctgccaccacgcctggctaatttttgtatttttagtagagatggagtttcaccatgttggccaggctggtctcgaactcctgacctcaagtgatccgcccacctcggcccccacaaagtgctgggattattagcatgagccaccgcgcccggccagaaaaatgcactttctgagaggctgggtgggactctgactagccagctgggtctgcggggcaggagatccctgtggaaggtggggaaaatctttccacctgtgaaggcctagaacactagtgaccagatgaggttcctgagggagaagtctgcggtcctatacattgagagaaatagctggcgttggtctagatttgttggctgggccgaactcctgagtgtcttaagagagctgaatagcctgaggtcatagaccccaaggtcatggagcaggtgtggactggggattagggaaccgtgggacaagtctttatgggaagtggggctaaggctcaaatatctgggaccatgaagggaagcagaaagggtctctgagatagggaggacagggcaagagttcattccactcaaccagttcccctatctcttccatccctcagagatgtcaggctgaaggagatgatgaaactctgtaagccgaagaacatggggaaagaggagacacaggaaggtagtgaatgccccctccccactcccctccccatttgtcttctgccccatcaatttctagatcaggaaggggtttggaatccaacactccttcccatttaagatgagaaagtggaaggccagaaagggggtggcttagaagcagtcatcagaaccagctgtgtagccttcagctgtctgtctccccagcactcaccatggtcctgctggcagtacctccgaaggctcatgtgtaccctggtgtccgacatattgcagtagttttgacactgagggtctggggagggtcaggctgtctgcagtgggctcctggggcctagaccacagccttctgcccctgcccatccctccgttccatcttgatggccagctggggtacccaaacctttgggactgggctcaatgggtgacccatgtatccccatctggggacccagtcagcccatcctcattcccacttgccactcagggacctccgtgccagactgtcttaccagagctataagcaccaggagtagtggcaagggtggttgttgcctctggaattcctgtgagaccaaaggagaaattaacctcttagtcatttcccccaggatcccctcgcccctgccccgggaatccaggcacccaaactcttaagtgtttattcctttaggactcaagagtgcaagcatcccttgccttcaggccccaagcctccttttcctcaagagtccagaatttcagtccctgcttatccgagggcccagagtccagcctccagccttgggctcccaattcccaaggccccagccctcactgcagctgtgcactggagacctgggatgtctccttcccgctctactcaggcttgtggcctggcccctcaagacttacgctggcagggcatcctgggggagcggctctgctggtagccagggccacagcggttgcaggtcaggcctgtgacccctaacttgcaggtgcactgcccactggtctggttgcaggttcctcctgttgccccaatagggtggcactggcaggctacatgagcagaggagctgggggcatggggtatcagggccccagatgcccctcccaattccacagtgcctcctccctcagcctggggagtccaggcccccagcccctcttccctcagacccaggagtccaggcccccagcccctcctccctcaggcccagagtccaggcccccagcccctcctccctcagatccaggaatccaggcccccagcccctcctccctcagccccaggagtccagccctacctctgctccccccaggcctgtctgcaggccacactcacctctgcaggccctgcggctgaagataggctggctagggtccctccagaacccaggttggcagtagtggcagtgccgcccagctgtgtggtggcggcaccgctcacaaacacccccactccggccgcccgacagtctgaacagctcagagttgaaccggcagcgtcgggcgtgctggttgcaggagcaggctaggagcaaaatggggtgggggcgcatcagggccgagtgtgctgctccccagtcctcagctttcttcccatggccctgccctcatgaaaggaagccgtgagtgtccaaggtagaagagaatgcctgggtcccaggacatctctattattatcttttttttttgagacggagactcactctgtcacccaggctggagtgcagtggcgcgacctcagctcactgcaacctccacttcccaggttcaagcgattctcctgcctcagcctccc[136 bp omitted]gcctgtaatcccagcactttgggaggccaaggtaggtggatcacctgaggtcaggagttcgagacccacatggccaacatggcgaaaacccatctctactaaaaataaaaaaattagttggctgtgatggcttgtgcctgtagtcccagctactcgggaggctgaggcaggagaatctcctgaacccgggaggtggaggttgcagtgagccaagattgcaccactgcactccagcctgggcaaaggagcaagactccatctcaaaaaaaaaaaaaaaaggtacattggactggagctggtaagtccggggggactcatgaacctcctgaacatctgtgaaactgggcctctaaagagtaggctgcatccaggcacgatggctcgtgcctgtaatcctagcactttgggaggccaaggtgggcagatcacctgaggttaggagttcaaaaccagcctggccagcgtggtgaaaccgtctctactaaaaatacaaaaattagctgggcgtggtggcacgcgcctgtaatcccaggtactcaggaggctgaggcaggagaattgcttgaacccaggaggtggaggttgcagtgagccgagatcacgccactgcactccagccagggtgacagagcaagactccatctcagaaaaaaaaaaaacaaaaagagtgggctatggcctgtggaatcagacccttttagccttgtcggtctctctgaccgtattccctggacaggtaatttatcccttctgtagtttgattggctgtgaaatggcatttataatgtttacttgaggcttaaatgagataaagtggataaaaagtgcatagcccaggcctggcggagagcaagtacttggctgtctagcattcgtacgtgcaggacaccctgcactgtgtttgatgtatttcatctccacaagggctctgtgaggctggcactattatcatccccattttacagagggagaaagctgaggcacagagaggtacagctagcgggtagttggaggcaggacttaaacacaggtcttctagcttgacagtctgagctcttagctcactccagtaatacacagctcccgtgaggattatttagcatgtgcattatcctgggagcgtttgtcaggtgttttaaggtggctctcaaaccttactgctcatcagaattaccagggaaatgttttgttgttgtttttattaaaaatacattaacagggcatagtggcccacacctgtaagtcccagctactctagaggctgaggtgggaggatcacttgagcctgggagttggaggctgcagtgagttatgattgcaccactgcactccagcctgggcaacagagtgagaccttgtctttaaaaaagaagcaaaaatccaaaacaacaacaaaagccagattgcaaggctcctccctaggctttctgatgggcccaaggatctgtatttcca[132 bp omitted]acagcctccaactcctgggctcaagggatcttcccacctcagcctcctcggtagctgggtccacaggcatgcaccaccacaccaggctactttaaaattttttttttaaagacggggactcattatgtctcccaggctcatggacactctttgaagagacttggactgcagggtgttttgacactaagaggtttgagagccctggactggcaggtccctgagagcccggaagagttgtgggataatcagggagctcagacggctgcatgttcttggaaaaacaactccccctctcccagcctctgttttctccctgtccagagagaatccagatccctctctcccagggtttttgtgggcattcaaagtggcaaagctattcagatgatcagtgagttgagtcaggttttggattctttctgacccaagggtaatcgttttgcctcacttcccctgtggagaactcagatgagggagaggagatgcagaccaggatgtctgtgaagcccatagctctgccacaggcattagtctcacctggccaccctgacctttctccactgcagcattgtcagtctcttacccgggtttggagggcactgccctgctcagtctggggggatgtggtgaccctcaggacagcctccccagcgcccaggccctgtccaggcccaggatgaaggctgcctcatcctcaggcctggtgagtctcacccctcactcccctgcttaggtaaaagatttggccaaagaatggggatggtctgtaagttagcccatgtgatcttcatgtatgaagaaatagaggggcagaggccgggcgcggtggctcacgcctgtaatcccaacattttgggaggccaaggctggcagatcacctgaggtcaggagtttgagaccaacctggccaacatggcgaaacctcatctctactagaaatacaaaattagccgggcgtggtggcacacacctgtaatcccagctactcgggaggctgagataagagaatggcttgaaccccagaggcagaggctacagtgagccgagatggcgccactgcactccagcctgggtgacagagcaagactccatctcaaaagaaaaaaaaaagaaatagagggccgggaggcaaagcgcatgggaggtggagagggaaggccagggtacacttgcacacgtgtgtatatgtctgtgtctgttggtagagttacctcccaggacctcagaccctgtaccaagtgtctcaggctggaggagggagggggtcagggccggaaggagctgacaccggctgtctctgaggaggggctgttggagggaggtagggaaggcctggtctggaagcacctgtgggaaagagggcatcgcatgggacattcctggggggcccctgtccagctggatggagcagcggattgttgcagcatctaggaactcagggctccctgggttaaatcccttgctggcaatgagacttagggcaagtgacctctctttgagcctcaccttcctcagctggggagtggcgactttggcaggtgctcaggaagccgttcctttgtgccaggtaccacattgggctttatttaaaggctttatgtgtattaatgcatttaattttcactacagcctgtaaaggatgtgctgttactatccccaatctatggtggaggaaactggggcaccaaaagattaggtcacttgcccaaggtctcacagcaggtaagcagaggagctgggattcaagcccaaatagtctggctgccaggccaccaaggccgtgctcctgtctgttgcctcttgtctgccacgtggtgtgacagtacccagcaggagcctggcagggacaggctgagaccccagaacttggcttcctgagctcagatcctggccctgccacacgcagccactgtgtgtccttgtgcaggggacttctgaactctaggcctgagtctcctcatctgtaaaatgggcctgatgacatccctgcctggcacacgtaggtgactgataaatatgtgtttaatgaccgaatactttccccctgtggttggtttgaggagtcaggtaccatccagctgtcctgttcccctacaactgttcaataaatattacccaagtacctgcatccagccaggccctgggatgggtgctcggaaactgttattacatcatcatcaccaccaccatcatcatcaccactatcaccaccatcatcaccactatcaccatcaccatcatcaccactatcaccaccatcatcaccactatcactatcatcaccaccaccatcaccatcaccaccaccaccactatcaccatcatcaccaccaccatcaccactatcaccatcatcaccaccaccaccatcatcatatcaccatcatcaccaccatcaccaccaccaccatcaccaccatgaccaccatcatcaccaccatcaccatcaccaccaccaccaccacgaccatcatcaccaccaccaccatcaccaccaccacgaccatcatcaccaccaccaccatcaccaccaccatcaccaccaccaccatcaccaccaccatcaccaccaccaccatcaccaccaccaccatcaccaccaccatcaccaccaccaccatcaccaccaccatcaccaccaccaccatcaccaccaccatcaccaccatcaccaccaccaccaccatcaccaccatgaccaccatcatcaccaccatcaccaccatcaccatcaccaccaccacgaccatcatcaccaccaccaccatcaccaccaccatcaccaccaccaccatcaccaccaccatcaccaccatcaccaccacgaccaccatcaccaccaccaccatcatcaccaccatcaccaccaccagtcatcaccatcaccaccaccaacaccaccaccatcaccatcatcaccaccatcaccaccaccatcatcaccatcaccaccatcaccaccaccaccaccatcaccatcaccaccaccatcaccatcgtcaccactaccatcaccatcacaccaccaccatcaccatcaccaccatcatcaccatcaccaccaccaccatcaccatcaccaccactaccatcaccaccaccatcaccatcatcaccactaccatcaccatcaccaccaccatcaccaccaccaccatcaccatcatcaccactaccatcaccatcaccaccaccatcaccatcaccaccatcatcaccatcatcaccaccaccatcaccatcaccaccatcatcaccaccaccatcaccaccacagtcatcaccattatcaccaccaccatcaccaccatcatcaccattaccaccatcacaccatcatcatcatcatcaccatcatcacaggctgatgagtgttggggagaggctgagcccctcatgagcagacaggcccatgtgtggctgagatacaggactggctgcagggaggaggtatgaggggaccgagtctgagactggggtgagaggcaaggagcacccagttccagcgagggaagggaacatcctgctcccgtagggacaaaggacccagtggcaggcaggcaaaggcagggagagtgaggggcgcaggactcacgtaggcaagggtgggggtgccggggcgtggcaggccgccagggccagtctcgatgggacgggcggcagctctcgcaccccgggccagtggtatggtggcggcagtggcagcgggggggccgggcacgggcggcacagcgggcagcgtggccatgacactggcagcggcctctcagcccagctgccgctagcccggcctggcccccaaactccacacggaggtggctggccgccacagtggccttaggacctggtgtggagtggaaggtcaccctttcagggccccctaaggccccaggccaggcgggcctgtgccacagcagcctccagggaccccctgaggcccaggcagcagacaggatgagggctgggggtcctggggtacagaagcgcaagctgacagatgtcaggaggaaggggccacccagggccaaagtcaggctgccattgcaggtttccctggcgccaaggtggtttcctggggacagggcacaggcctgagggcaggaggccgccacggcagccagctgtgtcactggcgggaggcagaattgggggcggccctgtggatcgtagcatgggtccgcagtggcctggcccaggaggagcaggagggcaaaggtcacgggcatggtcacagcagagccagcacctggagggaagagaggtggctgggctggggatctcagccgcagcctctacccctcctggaggtgtcctgtggaactggggcattccacccccaacccgtccaggccccctccccggctgcatggaagcgaggaaaatagttccatctggggagaattactgtttacataacccaaaggggaaagaacgcagacaaaatcgagaattttgcctgaactaatccgtagcttaacaccccagagttatccgtcagtgtcgaggggcagggggccctggggagcggtgagcggctggagcagaggggctggccaaggccagcagacgtggaaacctagagagggacacagagacaagcagggctgggcaggagagggggcttagggacagatgaagactcagtcacaaagaaatagaggacaggacagaggcagagagaggacagtcagcctaggggaggcgctcggcacagagaagttgctgcaaagacagaggaacagacaggaggctgagaggctgagacagaggccaggcacccagaggccacagggagctgggagactgaggctcggactgcctgggggctgggataggtgggcaggtgggctcagagacacccagcctggcaggccctggggaggggagggaaggggacaggctaggggtgtctggcgggggatcagaagtgagagaccgaggcccaggcctgcagggatcagagccattgcctttcccacatggggccctaaccttgttctccacaccctgggcacggaaggggattatcaccaaacaacccagcctccctgccacccgcccacccacccccagcgccccacccttaaccctttcccacccgagtgcaaagcccagagagctgagctgaggaaagggatgctgggagctggaacctgggtggctctggggcttgggagcgggacagtgggatccccatggggtcaggggaagcagacacctgggttcccttcagaactcagggtgtggggaccggaagttagcgttctgggactttctgctcacctcaaccctgccctctattctgggcctcagggcctggagaccagagtccccacattctccacccatccagagttccccagagcagatgggggaacagatgttgggggcggtgggtaatgaggaggagagaggcaggaaggcaggagctgggacagggtggggtgccagatgccagggcgcccgtgggggcagaagcccagaccctaggaatggcaggagctgggaaggactggactctgaaatgcccccactttccccttccagggccagcagcctctggtgaggagctcactgtggactgggggcctcggagcctttccaggcccttggctctgaatctgcgcccaggaatgtccctgggctgggcatctctggggcaccctggcggttgaggtgggccacacctgccccagcctggcctcactgcccatgtccccactgctgttggccacatgcagacgctgcctcccctggcccagatgacaggcctcgccctccgccctcccaaggagcctggcgccattttgcacccactcaggtggcagccgcctgcctggccctcagcagcatcctgttaagggccagtcccccatgtcccctttctctctggatagttgctggatagttcagggggtggcaccctctggcccttagcaccttgaggaaccaggctgtgagttccctagtgttcctgggggatccagaaaccagtcgtggcccacagagagcccatacccctctttaagaaagagtccagccatgctcccagcagactcataggaggcctgcctgggcggcctggggtccatctgggacccaggcttcctttccctggctcttggcatgcaccccccaacccgagccctgaggccccgacattggccaaacctgcactcaagaagagagcgtcctgcagccagttccccgcaggctcttcctccaagctgtggcgcggtgggctctcaggagggagtggcgtggctgttctcaggccccaggctagtggggtttctgggctgggcgggggctcagagcagagcccgcagaatctaacaccgccacccccctcccaccccaatccctcaccaaccgcagccacgctatccccacagggacccctgccagccaggccacccgcaacggtgtgggacgtgagtgccgttgcccccggcggtccagcagcaggacagccccgagcagcctggcctaggaggctcaccgcaggtaggacgggaggctgtcagtcgggggtcccgctccatcccactccacccctgcccactggctcagccccgccttgtggtggccgccatcgcgatcgggcaggggctgacctttgggagacaatcgctgttggaaactttgctcagcccctgcctctggctgcgtgaccccaagccagcccctcctcctcctctctggaaccttttgtcagctgtgggttcaccgagccttaaggtcagtaaaatctgtgctcttggaaggttcagaccagcccctggaattcaaaagacctcagtcgctttctaagatggtggggaaggcgacaaatgagctgagaacacctgggccccagtgtttctcatgcggcagagggagaaggcggggacccccggggtgcgggggaccaagctcaaaagcacctccccagtgccgctggtgtcctgcgagtcctcagtgctttcatcgtgacattttcatgcgaatgttgctgtctgttctattccatctccgaatgggttgactagaaaaataatgttttctgtcacttcccgctgagaaaagcaagggcctcatggagttggggcgcggcacctgctgccctgggtggccccagcgtttatcgtggtgtagcgtgggcccaatcctgacaggcttgggacccactgccccaggcccgcccccagggggtgcgagggcacagcaaaggcgaccctcgactctggacccttaggtaccacgttggagggggccagatttggcaggagcaggacagggacatcggatttgaaagaagggagtcactccgaaagctgggaggtgcatcagctgcaggaggatggaatggggctgagacgccccccatcagagggggcatgtcagagctgggggcccaggctgtgtgagtcagagtggaacttcgggattcaggcgcaggtccctccgctgaccctgcctgagctccccctgtatgggactttgccgggggttcgcgctgggaacacagacccctgccccatcaggctcagtgtccagagagggagggggagaccccagcagcgcaggtccttctgtgctctaggttgttggaaggtgccaagtgccttggagcaaagcaagtggggggggcggccacgggggcccggggattgcagatgtaagtggggtgatgcggaggggcatttgtgctgagcccaccgccagcacagaacccagctttgctgccacacaaaactgaggaagaaggcttaggtctcgctgcgtcttcctccccacctgggcgaagtctcaagctccggctcctggagggaagcttttgttccttgcagcttgagctgcctgagttgatgggcgcccctgcgggtgcccgggggcaggcggggaagaacagacggagctgccacagccgagcacatagtgccccaagctgggaaggagactgttttttttgttggggagagttctttaagggctggagaccttcaccctcacagcttctacagaaggccaggcctgcccaaggcacatctctgaggtgggttcaacccagagagaacctcagtgctgggctcacacagacctctaacccctgccttggtggcccagatataacggagtctccacgaggcagggcaggtcacccgcaggagttactgggcattgtgtggctgggtagggcctgccctcccggacatgttcaaaaaggccaggatggtaaccccagccatactgcctgggttcaaatccacctctgtcctagctgtgtgaccgagaacaagcttcttaacctctctgtgccttcatttcctcatctgttaaatgaggaagaaagaatggaccttcctcatggtgggcggagggggtcatgaggactgaatgagctgacatgcccacgggttcttatctgagctctctgggaaagtcgtgttccggaaccttctgcttcctggccctgttgtcggatgcatagtacgtacgtgacatggcatccatggtaggtctgggccgcatcacattgtcaaacatgttatgttttaggcagcagagcacatgggtgttcacagtaagagaagtaaagtctgcaaatagccacatgaccctcctccaagccagggttgtccccagatgagttcagtccaggttggcgtttgccgctccccctgaggaaaatggctgacaaggaatcgcggaccaggacagccagccccgtgatgggcctgcccgccagcaccctcgcagcctcggccttggctggtgcttttctgcggctttctggttgtctaggctgagaacagccacaagagggagcacctgagattccaggagaagccagagcagccgcggtacccactgcttgatctgcagggcctgggggaaaatgcagacacaggaccccttgtttagaatttatgaaggattttaagacggcaacaccagatcattaaagcaagcgtggggcctgtctcagcgcaactgcacgagtcacacaaaatgaaggcggaccccgcggggggcacccttgtcctgagctggtttcccttggccagtgacccaggctcctgtccctgccctgcacccccactgaccccagctctagccttgggacctgcctgggggctccagctgggctcagagctcagctccttctccgtggggcaggaccctgagttgagtggatggcaagatcatgtttgggacacagttttcaccagctcagtgaaaaaaggcttgggcagatttaattcactttttgcaaactaaagcagcaccaggagcatttttcttaggccttaggccagctggccttgctggggacccacacgagactttcaaggagggccccagagtgttcaggcttctcagaagggtcagatgaaccaaatgaggagccctggaatagaggaggatgacagctgaagaggcctggagggccccagattgttcaggcttctcagaagggccagatgaaccaaatgaggagccctggaatagaggaggatgacagttgaagaggcctgtaggcccccgatgtttaagaggacaggcggagggagagatggggagccgggaggggtgaggcagaagccagaagttttaggggtgagcccatgccaaccagggcttcagcaggaatggggtgggagggagggggtgaagggatgactgctgagctgtagccattggagtggccacagggaaaccataggacattggtcagaggagtggacaaggggagaagagaaagccgatcaggacatggtagaggctgggagcagaggaccttctgggagccctggggagagctggaggagactcggaaagagcagcccccggagaagggaccatccatcccacggcgaggaccgggaccgaggtccttggagcccagtcaggcccagtggtcagggctggacctggaggtgaataggtgtgggccccacggtgagatggccctgcacacccaccacaaccaaacacgacggcgagcgaggctgggaaatggggccttcccgtactgctggtggaaacggaaactggggcagccacctggcagctcccaaaacgattcaacgtagagttcaccctgtgacccagcacacaggttcgtggcagcactatttgcaacagccgaaaactggaaacaactccagtgcctatcacctgatgagtgaatacattgtggtctacctggacaatgggactttcagtcttgaaaggagtgaggcaattatctgggcgtggtggctgtacctgtagtcctacctgtagtcccagctactcgggaggctgacgcaggagaatcactgaaacccaggaggtagaagttgcagtgagccgagattgcgccattgcactccagcctgagcgacagagtgagacaccgtctcaaaaaaagaaaaagaaaagaaaggcgtgaggctgtgacacgtgctatagtgtggatggaccttgaaacacggtgccgagtgaggaagccagactcggaaggccatggagtgtgtgattgcagtcacatgaaaaatcgagaataggcaaatccataaagacagaaaggagattacttggtggggggacaaggaacagggaagattgtggggagatggttaaagggtgtgggtttttttgggaggggggctatgcaaatattcaaaaattgattgtgctggttgcacagctctgtaaatatactaaaagccattaaatcgcacaccttacgtgggtgaatggtagggtatattaattatatctcaaagtggttgccaaaaaagagctggctggacgtggtggctcacgcctgtaatctcagcactttgggaggctgaggtgagtggatcacctgaggtcaagtgttccagaccagcctggccaacatggtgaaactttgtctctactaaaaatacaaaaattagctgggcgtggtggcgggtgcctgtagtcccacctacttgggaggctgatgcaggagaatcgcttgaacccaggaggcagaggttgcagtgagccgagatcacaccactgcactccagcaagggcaacagagcaaaaactccatcataaaaaaaaaaaagaaaagaaaagaaaagaaaaaaatgaataatcataaccctacatacaaaagctaaaactggcccatgcctataatctcagtactttgggaggccaaggcaggaggattgcttgagcccaggagttcaagaccagcctgggaaacacagtgagaccccatctctacaaaaaatgtaagaattagcggggcatggtggcacatgcctgtggtgccagctactggggaggctgaggtggaaggatcccttgagcccagctgtgatcagaccactggcactccatcctaggtgacagagtgagaacctgtctcaaaaaacaaaagctgaactctccagcttgacacgatagtgcagagggaacattctcaaggcaagacatgaaagctgttagttctttaagtcctgggccagaaatggacacaatttcacttgcactatattaaagtggtcaaggcagtcatgggcccgcccagatccaagggaaagggagtccaggagtctgtggtggcttgaacccaccacacccactaatagtatcaggaaacgcttagcacttatcagtgcaggggtgtggcagccccatttcttggaggaggagaggaggagttaaataacacctccaggtcaccagcctgcagaaggcagagcctgtccatgaacttgggcccacctgtgctctttcccaaactctgcacgggcaccaaagattcttacctgttttttcctctgctggcttcctggccctgagcaccgtgcctggcattgtaataaatactctgcaagtattgattttatttatgttatttttattttttttgagacagtctcgttctgtcacccaggctggagtgcagtggcacaatctcggctcactgcaaactccacctcctgggttcaagcgattctcctgcctcagcttcctgagtagctgggattacaggcacccgccaccatgcccggctaatttttgtatttttagtggagatggggttttgccatgttggccaggctggtctcaagctcctgaccttaggtgatccgcccaccttggcctcccgaagtgctgggattacaggtgtgaaccaccgtgcccagccactgcaggtattgattttccaacacatacagggcatttcctgtgtgcgaggcactgctttacaaaatcatcacatttaatcttcaagcaaccccatgaggtagttctgtgaggtagaatcatagaaatggccgtgagtaggccaggcacggtggctcatgcctgtaatcccaccactttgggaggctgaggcgggtggatcacgaggtcaagagttcgagaccagcctggccaccatggtgaaaccccgtctctactaagaatacaaaaattagccagggttggcagtgcatgcatgtaatcccaactactcaggaggctgaggcaggagaatcgcttgaacccgggaggcggaggttgcagtgagccaagatcgtgccactgcacttcagcctgggtgacaaagcaagactccatcgccaaaaaaaaaaaaaaaaagaaatggccatgagtgtaggtaaaatcgggttaaatattggcactttcaaatagttccatctactcatccccatttaacaggtgaggaaacagactcagagaaactcagtaacttcttgttgtttttgagacagggtcttgctctgttgcccaggctggggtgcgggggcacaatcacagttgactgcagcctcaacctcctgggctcaagcaatcctcccacctcagcctcccaagtagctgggaccacaggtgcatgccaccatgcttgactaattttaaaaaaaattttttttttttgtaaagatagggtctcactttttttgctcaagctggtcttgaacttgggctcaagtgatcctcccatctcagcctcccaaagtgccaggattacaggcacaagccgctgtgctcagcgaggtgcagtaacttgactgaagtcacaaggtgctggtgaggctgggacttccagcaggaactcagcctcaggtggaaagaccccagggtctgtgctctgaggcctctcccatgcactgtggtgctcaggacagaggcttggatggattgagtgagtgaatgaatgactttggcagggggtgggtgaagagactcctgtccccccagccctgcctcctgaccatgtcctctctcctccccacagccgtcaagggattctgggccacccgcccttccttctccaccttctacttcgtctttgccatttttgtggtgtccaccatctttcactgccaccagcacctggctctggtgcctgcgccctgggcatactcagcccgtgtggtcctggcccccagacacctgccccgggaggacctgttcactatcaactccaagggccgcctggggaaccagatgggcgagtacgccacgctgtacgccctggccaagatgaacgggcggcccgccttcatcccggcccagatgcacagcaccctggcccccatcttcagaatcaccctgccggtgctgcacagcgccacggccagcaggatcccctggcagaactaccacctgaacgactggatggaggaggagtaccgccacatcccggggcgctgtgtccgcctcacgggctacccctgctcctggaccttctaccaccacctccgccaggagatcctccaggagttcaccctgcacgaccacgtgcgcgaggaggcccagaagttcctgcggggcctgcaggccaagtgggcagggcaggcgaccttcgtgggggtccacgtgcgccggggggactatgtccgtgtcatgccgcgcgtatggaagggggtgctggccgaccggctacctgcagcgggccctggactggttccgggcctgctgccgcctcccggtctttgtggtcaccagcgatgacatggcctggtgccgggagagcatcaacagctcccttggggacgtggtgttcgctggcaatggcctccagggctcacctgccaaggacttcgcactgctcacacagtgcaaccacaccatcatcaccgtgggcaccttcggggtctgggccgcgtacctcgcgggcggggacactgtctacctggccaacttcaccctgcccaactcccctttcaacgtggtctttaggccgtaagcggccttcctgccagagtgggtgggccttgcggctgaccttggacaggctggacagaacggcctctagccagccctgcatgtgcctggtcctcatcctgtgacccgaggggcagtgagtggggcgtgcggggcatggactcacggtccctcatgcagtttggatccaggcttatctacttcatagctgagtgagtttggacaactgactcaacctctgtgccttagtatgtcaaccacaaaatgcacaaaccacagaactaaacaccagtagcagctggtgggagctgagcaaattcgcttagagccagtgccttgtgaccgtgtgggaggtgtcggctgctcacatgtatgcagcacgtcaggaacactggcattgctttccaatggaaacgcagttttgccctctccttcctggcagcactggtagcacagagcccagatattttgcactcacgtcccaggacgaagccatccctgccctgaaggataggggaactcgattttctgggcaactaggaattttggctttggagttagtgggccttatcacaaaagaatgtgagggaagggccgggtgcggtggcacgcctgtaatcccagccctttgggaagccaaggctggtggatcacttgaggtcaggagttcgagaccagcctggccaacatggcgaaacccagtctctactaaaaatacaaaaagccaggcacggtggtgcgtgcccctaatcccagctactccggaggctgaagcaggaggatagcttgaattgggaagcagaggttgcagtaaaccgagatcataccactgcactccagcctgggccacagagcgagactccatcgcaaaaaaaaaaaaaaaaatagaattccagggaagacaggatttgcagggacacacctatgaggagggattcccctgcgatggacaggggaggggtttaggtgcaggtagcaccctgggcgcagggaagaaggcgtcacagtgagggcagaaaagacactcctcagatcctggaagcagcaacctgacccccaggggccactaagaccaaatcatggccatctcagcagcagcgtgtgtgacagttactggaaaaagatacctcacacctggcactgcctaacccccgagaacctaatgccactctgagaaagctcagtacgggtgcaagttggattaagtaattgcagtgcgagttttcctgtgttttattggtgtaatgctccttttggacattaaaaaaacttgacatatacaatgatcatttacatgcattaaacatttccaccaaatgtaggtgcagtggtttagaaaacattccaatcacatctctttcccatttgaaaccttttcaaggttgggtgcagtggctcatttctgtaatcccaacactttgagagctgagttggagggggatcccttgagcccaggagttcgagaccagcctgggaaacatattgaaacctcatctctacaaaaattagctgtgcctggtggcacacacccatggtcccagataatcaggaggctgaggtgggaggatcacctgagcttgggaggttgaggctgcagtgagccatgatcacaccactgtactccagcctgggcaacagaataagaccctgtctcaataaaattaaataaataaataaataaattgcttgcagctggtgccaaggaatggtagtctcccagtagacagaaaacacccgaagctggccaggtgtggtggctcacgcctataatcccagcacttgggggcccgaggtgggcggatcacctgaggtcaggagttcaagaccagcctggccaacgtggcgaaaccctgtctctaataaaaatacaaaaattaggccgggcacggtggctcatgcctgtaatcgagcactttgggaagccgagcctggcggatcacgaattcaggagatcaagaccatcctggctaacaaggtgaaaccccgtctctactaaaaaaaagaaaaaatacaaaaaaattagccgggcgtggtgg[134 bp omitted]tcaaaaaaaaaaaaaattagccggtgtggtgatgcgcgcctgtaatcccagctatttgggaggctgaggcaggagaatcgcttgaacctgggaggtggaggttgcagcgagctgagatcgcgccattgcactccagcctgggcaacaagagagaaactccatctcaaaaaaagaaaaagaaaagaaaacacccgaagctggtgatcagcagcttcccaataagatcttgggagttcggcgagtgggcacaagcatgtgcactaagaggcaaaatagcagagtttaattggtacatgacctcctggggacattcagtgggtaagggaagaacgcttcaagtgagcacgcgtataacttcagtaaacacactgcgcatgctccccacccaggcgctggtaggccaccgcctaagtgaacagcccaccccaagggaggaactggggagaagggacgcaagaccccagaagtgtgccaacatataaaaccccaactcaaaaggtcaaactgcacacttgtctttcatgtcgcccgcttagccctcttccaagtgtactttcattccttttgtccctgctctaaagcttttcaataaactttctctcctgctctaaatgagagcctattgcccaggctgccttggtctttccttctgcctattcccctcagtcgaattctttcttcttaggagacaagaattgaggttgctgcagacccacacggatttgctgccagtaacagggtttgggcttgggaggtgttaaagaacacaggaggggccaggcacggtggctcatgcctgtaatcccagcactttgggaggcc[133 bp omitted]gaggcaggagaatcgcttgaacccaggaggcagaggttgctgtgagctgagatcgcgccactgcactccagcctggtgacagagtgagactccgtctcaaagaaaaaaaaaaaaaaactcaggaggagggctgagtgcgatggctctttcgcccaggctggagtgcagtggcgccatctcagctcactgcaacctccgcctcctgggttcaagcagtcctcccacctcagcctcccaagtgggattttaggcacccgctgccacatccagctgatttttgtatttttagtagagatggggttttgccattttggccaggctggtctgaccgcaagtgatccttccacctcggcctcccaaacttctgggatgacaggcgtgagccactgtgcccagccaacagctttcacattacaaaagcccaagcagaagctggcaagctgccaacaagctgcactaattcatcaataaatatttactgagtttcttactgcatttgcaaattccaaagcagaagttggacagacacctaaaagcccgccctgtccctcaccagaaggggacaaaaggaagctgagcaggacaggggccacttaagtcccctaaagaaggggattgcataccccagcacctcagacagtatccagtgcacagcacatgttccttatggtttgacttgtgacgagtccccggccaagtttccttgtttcatttttttgagacagagactctctctgtcacccaggctagagagcagtggtgcgatctcagcccactgcaacctccgcctcccaggttcaagtgattctcttgcctcagcttcctgagtagcttggactacaggcacctgccaccactccctgctaatttttgtatttttagtagagatggggtctcaccatg[132 bp omitted]ccaagtaggacctcagtccgtcacccaggctggagtgcagtggcacaatctcggttcactgcaacctccgcctcccaggttcaagtgattctcctgcctcagcctcctgagtagctgagataacaggagcacaccaccatgcctggctaattttttgtatgttcagtagagatggggtttcaccatgttgtccaggctggtctggaactcctgacctcaagtgatccgcccacctcggcctcccaaattgcggggattacaggcatgagccaccgtgcccagccctggtcagtcttgaggtctgtgttgatgttaaacactggtcagctgagcctgaattacaatggcaggagggtataatgaggcatgtccagccacccagtcccatcctgggctgaactagtgtttcaggtttactttagaatgcccttggtctagagggagggtccattcagttacctgggggactgagaattttatttgtggtttacagtaagataattgtaggtgtaactggttaagtccaggttatactggagtagggtgtgtggtgtccctaatccgttatgacgggtgaccacacagacaccaaagaaaggaaagccacatgatgacaaaggcagagattaactctgggcctccagaactaagggagaacgggctgggcgtgatgactcacacctgtaattccagcactttgggaggccgaggcaggtgggtcacctgaggtcagaagtttgaggccagcctgcctaacatggcgaaaccccatctctactaaaaacacaaaaattagccgggcgtgatggtgtatgcctgtaaccgcagctgcttgggaggctgaggtgggagaattgcttaaacaggaggcggaggctgcagtgagccaagatcactccaacctgggagacagagtgagaccctgtctcaaaaaaaaaaaaaaaaaaagaaaaaagaaaaactaaaggagaatgattttcttttgctttgagggacccagttgtgtgttaccttcttagagcaaccggggaaacacatagaacgtctaatgcatattaattgaatggattgtacaaacagagcgaaaagagaaccccatggcttagcaggaaagcagcttagagatgaaaggtttcagtgtccttggcacagggctagtagtcctggagatgatttcatggacactgtcccaggaagtaaaattctggaaatactttcattcattcaacaatatggtcatgggtcacttaacaatagggatgtgttctgagaaatgtattattaggcaatttcatgttgtatgaacatcatagagtatatttacacaaacccagatggggtgtgtgtgtgtatatatatattaaattcattttttttaatatggaaaacgaaatctccgagcaccattattgaatatcagtcatctcctgtacttcatctgcaatgccaatacaaagtgccagagatgaggtttctatatatgctctattataatattttattcgtttatttttgagacacagtctcgctctgtcacccaggttggtgtgcagtggtgcaaacacaactcactgcaacctctgcctcccgggctcaagtgctcctcctgcctcagcctcccgagtagctgggaccacaggcactcactgccacacttggctaatttttgtatattttttttaaagatggggtctcactatgttgcccaggctggtcttgaactcctgggtttaagggatcctcttgcctcagcctcccaaagtgctgagttataggcgtgagccaccgcacccagcctatttatttatttttgagacagagtcttgctctgtcacccaagctggactgcagtggctcgatctcagctcaccgcaacctctgcctcctgggctcaagagattcttgtgcctcagccatctgagtagctgggatttacaggcgtgctccaccatgcctggctaatttttgtatttttagtagagatggggttcaccatgtttcccaggctagtctcaaattcctggcctcaagtgatccaccctcctctgcctcccaaagcgctgggatgacaggcgtaagccaccgggcccagccaaattttaaagaaaacaggatatcaatttatatctcaaggcaaagagaaagaatgtaagttcttttgttgtttttgagattggttctccctctgttgcccagtctgatctcaaacacctgacctcaagagatcctcccacctccagcccccaaagtgttgcgattgtaggcgtgctggcctactttctgttctggttttctttcttttcttttctttttttccttttttttgagacagtttcactctttttgcccaggctggagtgcaatggcacgatctcggctcaccaccacctccgcctcccgggttcaggtgattctcctgcctcagcctcctgagtagctgggattacaatcacccaccaccatgcccggctaattttgcatttttagtagagatggggtggtgggggggcagggggtgtttctccatgttggtcaggctggtctggaactcccgaactcagatgatccgcccgcctcggtctcccaaagtgctgcgattacaggtgtgagccaccgctcccggccctactttctgttttttaactggattactgagtccatttacagataaagccgagaaagcacgtggagtttccaggactggcctaagcctcacctatagaaaaagcaggcacagctggaaggcagagctcttggatcccagaaatcacggatcccattcctaggctgaatccctgatcccctagaccagtggcaaagcccaagagggaaatgcccagggacaggctgttaaaagctcccacactcagcctgggctgcaaggcacactttactgtcagttctgcttggctcagtcagaaatctgagttttttcttatctcaatgcatgaagaaatgaggaggataaaatttgcccactgtggtaataaccattcattccaaccttgtcagttatcttcaaaattgtagctattgacagtaactacttagttatcccatgaccaaaggtcaagtgttttcttaccttagaaagtaaccctcctgggcccggtgtggtggctcacgtctgtaatcccagcactttgggagaccaaggcgggtggatcacctgaggtcgggagttcagaaccagcctgaccaacatggagaaaccccgtctctactaaaaatacaaaattagccgggcgtggtggcacatgcctgtaatcctaactactcggtgggctgaggcaggagaatcgcttgaacccgggaggcggaggttgtagtgagccgagattgtgccattgcactccagcctgggcaacaagagcaagactctctctcaaaaaaaaagagaagaaagtaacccttggaccttcaaaagccaaagagatcagggagtttagtgcaaaagagagcagaggattagaccccaccctcgactcttggggctccgtgaggaagacagaagaccccaaaaaggaagtctgtggtgctttggctgagctcctcaaggaggctcagaatcactaaaagtctcttttttattttatatatattttttattattatactttaagttctagggtacatgtgcacaacgtgcaggtttgttacatatgcatacatgtgccatgttggtgtgctgcacccattaactcgtctcttttaaatctcttcatgtgctattgaaggagacaaaaggaagaaagagtggaggtagatggggaaacaagtcttttttttctttttttgagacaaggtcttgctctgtcgctcaggctggagtgcagtgccaccatcgtgactcactgcagcctctatctcctgggctcaagtgatcttcccacctcagcctccaaagtagctgggaccacaggcatacaccaccatgcccggctattttccacatttttagaaggcttggcgtggtggctcatgcctgtaatcccagcactttgggaggccaggacaggtggatcacctgagatcagcctgaccaacttggtgaaacccccgtctctactaaaaatgcaaaaattagccgggcgtggtggcgcacgcctgtaatcccagctactcgggaggctgaggcaggagaatcgctagaacctgggtggcagaggttgcagtgagccgagattgtgccattgtactccagcctgggcaacaagagggaaactctgtcttggaataaataaataaataaaaataaataaaataataataaataaaattttggcagagatggctcttgctgtgttgtccagggtgctcttgaactcctggcctcaagcgatccttcagcctcagcctcccacagtgctgggattacaggcatgagtcaccacactcggcccatcaatttattttataagcaaactggttcacatacgttttttcccgttaatccagttttggaaagggaaaaaaaccaagacttttaccacctttactggaccgggtcccacaggcagagatccaaggagctggtaagaaatctcacctttttctgccagctatttatcatttgtcccagaaaaccatctgtaggctccgaaacaagagtgatttgatttgcatcctgctcacagtgccagaactgcggggaagttaaaatgtttcccctggaggttaaaacatttgagtctatataaatcaaactaataatagccagatagcaggagaaaggaatacacattttatcatgtgcacacaggactcacagaaaatacgcaaactcagagaaagggccagatagctgaagttgttttttgagacagagtttcactcttgttccccaggctggagtgcaatggtgcgatctcggctcaccacaacccctgcctcccgggttcaagcgattctccctcctcagcctcctgaatagctgagattacaggcatgcgccaccatgcccggctaattttgtatttttagtagagatgggatttctccatg[138 bp omitted]taaagaagaatcaggacttggagactggtgagacaggttatggaagagagagaagaaaggcctggctacggagggctgtcttttaatgcagatgaaaccctgatgggtaggggctctcagaaagaataaactttcttttctttttatttgagatggagtttccctcctgttgcccaagctgaagtacagtggcatgatttcagctcactgcagccacccctcctgagttcaagcgattctcctgcttcaccctcccaagcagctggtattacaggcgcatgccaccaagctcggttacttttttgtatttttagtggaagacagtttc[133 bp omitted]tgccctgtcacccaggctggagtgcagtggtgcgatctcagctcactgcaacctctgcctcctgggctcaagtgattctcattcctcagccttctgaatagatgggattacagatgtgcaccaccatgcccagctaatttttgcattttttgtaggcacagggttttactatgttgcccaggctgctctcgaacttcagccctcacatgattcacctgcctcggcctcccaaagtgctgtgattataggcgtgagccacctcaccccgcccgtccagaaagagtaaatttctttcttttttctttttctttttttttttttttttttgagacaagtctcgctctgtagcccaggctggagtgcaagtggctcgatcttggctcactgcaagctctacctcccgggttcacaccattcttctgcctaagcctcctgagtaggtgggactacaggcgcccaccaccacgcctggctactttttgtagttttagtagagacggggttt[215 bp omitted]gcctcagcctcccgagtagctgggactacaggtgcccgccaccatgcccagctaatttaaaaaaattttttttaaatttttagtagagatgggggtttcaccatgttagccacgacggtctcgatctcttgacctcatgatccgcccacctcagcctcccaaagtgctgggtgggattataggcgtgagccaccgtgcccggcctttttttcgttttgttttttgagatggagtctcaccctgtcacccaggctggagtgcaatggcacgatattggctcagtgcaacctctgcctcccaggttcaagcaattctgcttcagcctcccgagtagctgggattacaggcacagccaccatgcccggctaattttttgtatctagtagagacaggatttcaccagggttggccaggctgttctcaaactcctgacctcatgatcagcccgccaccctctcaaagtgctgggattacaggtgtgagccactgcacctaatctaatcttttataactgtcaatctaatcttataactgtatgttagcctttgtatgcaaaatgctgtcattctgctcacgatctccattttttgttgttgttgttgttggttttttgtttgttttgtttgtttgtttgttttagacagagtcttgctcttttgcccaggctggagtgcagtggtgcgatctcggaacactgaaacctccaccccaccccgcctctgcctcccaggttcaagcaattcttctgcctcagcctcccaggtagctgagattacaggtgctcaccaccacacagccagctaatttttgtatttttttttttttagtagagacagggcttcactatgttgaccaggctggtctcaaactcgtgacctcaaacgatctacctgccttggcctcccaaagtgctgggattacaggcattagccactgcgtttgacctctccatttttacctgtataaatgagttccacttttccccatactggaagcactgatcaccattcttcggtgtccttgtgtccctggacagccaccctcacacacttgtgtttaaaaaaacttttcttatttttttcttgagatggagtctcgttctgtcacccaggctggagtgcagtggcgtgatctcagctcactgcaacctccacctcccaggttcaagcaattctcatgcctcagcttcccgagtagctgggactacaggtgtgcaccaccacacccaggtaatttttgtatttttagtagagactgggttacagcatgttagccaggctggtctcgaactcccggtctcaagcaatctgcctgcctcagcttcccaaagtgctgagattacaggcgtgaacaactgtgcccagatttattttttaatttttcagaggcagggtctttctctgtcactcaggctggagtgcagcgtcaggatcatagctgacgctggacctcctgggctcctcttgcctcagcctctcaagtagctgggactacagacatgtgccaccatgtctggctaattttctttattttttgtagagagacaaggtcttgctatgttgcccaggctggtctttaacttctggcttcaagctatgctcctgcctcagcctcctgagtagctgagattacaggtgcatgcctccatgcctggccaccacggccaatttcaagctaccaatatgagatcattgaacatgcaattggaaagaaatgcacagtattacattgttctatagcaagcctattacacagacataataaatgtaaataggccaggcaagatggttcatacctgtaatcccagcactttgggaggctgaggcaggaggatcgctttgagctcaggagttcgaggccagcctgggtaacatagtgagaccccatctctacaaaaaaacacaaaattaactgagtgtggtgacgggcacctgtagtcccagctactcaggaggccaaggcaggagactcatttgagcccaggaggcggaggttgcagtgagcacatacattgattggcacacagattggcagatactaacatacagtgtgtttttttctccagagaactggctggtaagtgtttaccatagtaagaagacttactatagaacaatgtattactgtgcgtttctttccaattccatgttcaatgatctcttattggtagcttgaaattggccgtggtggccaagcatgggggcgtgcaccagtaagggaaagctgaaatggaaaacagagggtttagggcaacagtcctgaattccggagtgctgtccccctgggggagttatgggaatctgtgggggttgtttttagttgtcacagtggaggtcctaggatgctaccacagcgtttacgcggctggggtcagcgacaataaaagttacgcaatgaaggtttgtcctgcattctcaggactttgttttatttttgagacagagtcttgctctgtcacccaggctggagtgcagtggtaccatctcggctcactgcaacctctgcctcccaggttcaaggaattctcctcccctagcctcctgagtagctgggattacaggcgtgcaccaccatgcccagctaattttgtatttttagtagagatggagtttcactaaaaaaaaatgttggctaggctggtctcaaactcctgacctcaggtgatcctcctgcctcggcctcccaaagtgctgggattgcaggcatgagccactgcgcccaggtcattcccatgactttggaacatctgtgggacattcatggagttggaaagtctaagcctctgagccccaaatctgttttgcgttttttttttttttttttttttgagagggagtcttgctctgtcgcccaggctggagtgcagtggtgtgacctcggctcactgcaagctccgcccccggggttcacgccattctcctgcctcagcctcccaagtagctgggactacaggcacccaccaccacgcccggctaattttttttttatatatatttttagtagagacggggtttcactg[137 bp omitted]cgccccaccctgtttcttttttccttgtcgctgaatcacagggaaacaggtcgtttgtcctgtggacgggctcacattctggactgggctgattgctgcctcatggtgtcgtttcactgggaactttgtcctcctgttttctgcaaactggtggttagagtgggaagcttgatctgatttttttgtttgtttgtttgaagggagctccgtagctggtaggtagcctcctgctgcttagctgaagctggggagtggctgctggtttctctttcctcctgttaggactgctgggagctctggtggtgcctgcctcttctctcagtaaaattcctcatccatcttttttttttttgagacagagttttgctcttgtttcccaggctggagtgcaatggtgtaatctcagtttactgcaacctccgcctcccaagttcaagcgattctcctgcctcagcctcccaagtagctgggattacaggtgcatgccaccacgccccactgatttttgcatttttagtagagacagggtttc[133 bp omitted]gggtttcaccttgttggccaggctggtctctgactcctgacctcagttgatccgcctgcctcggcctcccaaagtgctagaattacaggtgtgagtcaccacaccgggcccatttgtatttaaaaatttttttgaaataggcagggcgaggtggctcacgtctgtaatcccagcactttgggaagctgaggcaggagaatcccttgaacttgtgaggcggcggttgcagtgagctgagatcacgccattgcactccagcctgggcaacaagagcaaaactctctcaaaaagtaatactactaataattaattaataaataaatataagactctgaggggactcagagtcagcgagagcctggcctagcaggactctgtcccccgcctccatgctgccttcctggaggccttcctggctgcctggaggagcggagcagagtgggggcccctttctgttggggcatcacaacagttccccaaggaagaccctcggggacccggatgggggatgcgaccttgtcctgcctctctcccccacccttatggccaggcttggggtgcctggtgcaggtggaggagctaagggtagataacaagatggactttgtggccggcaatggggagggaggaggggctacgggctcacctccctcccgcagcccagccacacctgctctggaaagccctgtagctcctgggcggggtttgccagtcaccgatgctggaagggtttctttggccctgagtgaagagagacccagagggaacactgaggtgcctgcccaaccactctgtcccggtttccttcagcaggaccaggtgagagaaggtgagggggctcctctcccaccctacaacacgcacacctctgcacacacgcccaggcggagagcagggatttgggacgtggacctgtgtgccctcgtgggtccctggtgccctctgggaggcacccccaactcaggacctccaggagaggagggtccctccctcggcagccaggacccccctccccagccagccgccctccttagctccctccccacttccttccaggtggatctgtttctagagctccaaccaccagctccctccccttctccaccccgggccaccaggtccttccttgtctccttcccctcagcagtttctatgaaccaccctggcagtaatggtgcagatggctcgcgcacagctggtggtgacccgactttcctgcctccaccctggggctcctcagaggcttcatggaacccaaactgctggtctcacctccgagccctgccgtcgcccagggagggcggctccgtccctcctgcactccctaatcccgctctgaatcaccgcttctgttctgggtcggagaataaaggtggggtttccaagtgatggccctacgttattgtctgaagctcccttctcctccccagggtggaagtgataatgccgggaatccgggaatcccggggaggtgcaggaagacagcgagctcgaggcagtggggtgcgactgagccggatgtgctgagctgcccggggcacggggcggttggggtagagaaaggctttcagagctgggggacaggacggggccccgggtgagcggagagctgggttatttcacgggaacagctggtgacaaagccggaggggtgtgcggggccggcgagagactgggattgtgtcttaagaggcatagggagccctgaaggggctgcgagctgggaaggggcagggccggcgctgggtgtaggggacagaggggagaggag[133 bp omitted]gagaaaccccgtctctactaaaaatacaaaattagccaggcgtggtggtgcatgcctgtaatcccagctactcgggaggctgaggcaggagaatcgtttgaacccgggaggcggaggttgtggtgagccgagattgtgccattgcactccagcctggggaacaagagcaaaactccgtctcaaaaaaaaaaaaaaaaaaaaaaatctcagtaagatagaccaggtgtggtgtctcatgcctgtaatcccagcactttgggaggctgaggaaggagaacagaggacctcctgaggccaggagtttgagatcagtgtgggccacatagcaagaccccctccccaccatccctacaaaaaaagcaattcaaaaaaaataatgccttcaggcagaatgggagtggtgcttggttcaagcctgacataagtgtgagtttggggcacaaattctgctctgaataccagggacagcccatgtaatacagcatttccctttgtgcccacgcagccctaagggaggtgtggtttgttgttgttgttgtatctttttgagatggatttttgctcttgttgcccaggctggcatgcaatggtacaatctcggctcactgcaacctccgcctcccaggttcaagcgattctccttcctcagcctcccaagtagctgagattacagtcatgagccaccatgcctggctaattttttgtatttagtagaaatggggtttcaccatattagtcaggctggtctcgaactcctgacctcaggtgatccacccgcctcagcctaccaaagtgctgggattacaggcatgagccactgcactggctcttttttttttttttttttttttttgagacggagtctcactgtgttgtgcaggctggagtgcaatggtgtgatctcagctcactgaaacctctggggaggtgttgtttttatccctccccacaaccccctgttgatggacagacaaggacaatgaaacacagagaggtaaaagccctgggttaaagtcacacagcacataaaaggttcctgatcatgccgtgcagggcatctcgccaaacctcaaaaattcacaatctcatagcgcagcttgctctgtgaggcctccccacctcttccttctctccttccaggctccagtcaaggtcagtgcccagcttcctgctctgggccactcagcagccaccttcctccttcctgggtaaggaggtagggagctaccaaggaggcagggacatccgtgtagaacattctgcttttcttttttctttttttttaagatagagcctgactctgtcgcccaggctggagtgcagctgtagtgtaatggcacaatcgcagctcaccacaacctccatctcccaggttcaagtggttctcctgcctcagcctcctgagtagctgtgattacaggcatgtgccaccacgcctggctaatttttgtatttttagtagcgacggggtttctccatgttggtcaggctgctttcaaactcctgacctcaggtgatccgcccccgcttggcctcccaaagtgctggaattacaggcgtgagccactgcgcctggcctaattttctctaaaatagagacaagttctcactatgtggtccaggctgatctcgaactcctgaactcaagcaatcctcccagctcagcctcccaaagtgctagcattacatgtgtgagccatcatgcctggtccctgtctgtttcattctccctgtctctctagtcctgcctctctctgtgtcttctggtctttttctctatttgtctcttcctctgtcccttttatcatctctgtcccttccctccctccctccctcccttccttccttccttccttccataggtgagaaaaagtagcatcttttcctcacctatcacaaagtttgcagctggggcacctacagtaaaaggttaacagacacaagcataacaaatgtatttaaggcaagtgttgacatgggagccttcagaaatgaaggcctaaagaaacag[136 bp omitted]ctcaacctccccagtagctgggattacaggtgcgcgccaccatgcccagctaatttttgtatttttagtagagaaggggtttcactatgttggccagactggtctcgaactgctgacctcaggtgatccacccactttggcttctggaagttctggcattacaggcgtgagccactgtgcccggctacctcccgttctatgatctatggtttaaacgctacatttgaccactatcaatactcccagtatcaaaactgggaaacctgggttcttcacccagagcctaaaacgaacagcattctttgccttgtgggtgacaatagcaaacatttaccgcctgtgtatatgtgccagacactgttttaatcctcagagaggtgatgtcacttgcccaaaatcacacagctcgtgactgtgagtctgaaattggccagagcttgtgcacctagccactggtggtgatgtgtctttgagtcatcgagtccagcattctgtgttggacttagtgaaaggatatact[137 bp omitted]catggtaaaaccccgtccgactaaaaatacaaaaattagccaggtgtggtggtgcacacctgtaatcccagctactcaggaggctgaggcaagagaattgcttgaacccaggaggcggaggttgcagtaagccaagatggcgccactgcactccagcctgggtgacagagcaagactccatctcaaaaaaaaaaaaaaaaaaaaaagaaaaggaaaagaagtgaactggttcaaagaccataatcatacatatcacacaagactgcaagcggaccagggtcagttaatttagcggctccacaaagtcatcagtcacctgagctccatccatcttcacatgctgtgctaccatttattttattttatttttttttttgagacggagtctcgctctgtctcccaggctggagtgcagtggcgcgatctcggctcaccgcaagttgcgcctcccaggttcatgccattctcctgcctcaacctcctgagtagctgggactataggcgcccaccaccacac[187 bp omitted]gctgctacacatccagccatcacatgcagataatttctttcaaaaacagcagaaagaggctcgttcttgtcttggtcccttttgaagaatgaatgaaaccttcctaagccttccagcaactccccccacaactccgatgggtaggaattgtcacataaccatgtggcccgataggaggcaaaagaaatgagacttctgggattagtttagcctcagattctgcagctgagaagttgatcagccacctctgaaggacaagcagcttgcagaaaattagggtggtgttaccaaggagaaaaggggaaatggctttagagtagacaacagggatgccctgaggggttgtgtaggttgttcactgcacgaagtcccctggtcaagaaggtaagcggggtttaaacagacccacagtctactcatcaaaccaggtgtccttggcattgtgtccacccagagagctcactattttcttttcttttcttttctttttttgaaatggagtcttgctgtgtcccccaggctggagtgcagtggcatgatcttggctcactgcagcctccgcctcccgggttcaagcaattctcctgcctcagcctcccgagttcaagcaattctcctgcctcagcctcccgagtagctgggattacgggcgtccgccaccacacctggctaatttttgtatttttagtagagacagggccttg[144 bp omitted]tggccgatgaatgggaagtccacggtggagctgggtgttcctctcaagttcaactggctgcggccaggagggcaggcaggccaggtggacaatttcccttcaaagtggatacaggcaggacatgcaaagatgaatatctctggcactggactctggcaagtaggaaaataaaaacaaaagatgaacatcttgggccgggcgcggtggctcacatctgtaatcccagcactttgcgaggc[133 bp omitted]tgagacaggagtatagcttgaacctgggaggcagaggttgcagtgagcagagatcgtgccattgcactccagcctgggtgacagagattccatttcaaaaaaaaagaacatctctacaaactggatcaccagtaaataatagctacatatacttgtactcaccatatgtggacacccacatatgtacactcagtcgataaacacccacatttaaacataccatgtgggccaggtgcagtggctcacgcctataatctgagcactttgggaggccaaggtgggaagatcacttgggcctaggagtttgagaccagcctgaccaacatactgagaccttatctctacaaaagagaatttgtttttagttagctgggcgtggtgatgtgcacctgtagtcccaactactcgggaggctaaggcaggaggattgcttgagcctaggaggtcaaggctacagtgagccacgttctcaccactgcactccagcccaggtggcagagcaagatcctgtctcaaaaaataaataaaaaattaataaacaaaaaatgcatacaatgtatagatacacaaagtgtatatatatacatatatatgtatacacattcacatatacacacatgctgtgttcacaatcacctagatgacatatgtatgtgtatacatacttacacatatacccttacatgtacacgatatatctctacccatacactaccatgtacacatgtccatttgtacacagctgtatatgtacacacacaattttgcacacacctgtatatgtatacaatgtatggatccccatatccacattacacacaatgtgtacgcatctacctgtgtacacacacccacctatgaacacaatgtagacacatctgtataaacacacttgagatacatgcctgtgcacataggcaagtatgtgccaagtatttacacacctgaagtagaagcacacacacacccacactatgcctgcacaccaccgcatggccacgttcaccagcgccccgggcctccatctcccagctaacgtgtcccgttttcctcccctgacagccatgctggtcgttcagatgcctttctcctttcccatggcccacttcatcctctttgtctttacggtttccactatatttcacgttcagcagcggctagcgaagattcaagccatgtgggagttaccggtgcagataccagtgctagcctcaacatcaaaggcactgggacccagccagctcagggggatgtggacgatcaatgcaataggccgcctggggaaccagatgggcgagtacgccacactgtacgccctggccaagatgaacgggcggcccgccttcatcccggcccagatgcacagcaccctggcccccatcttcagaatcaccctgccggtgctgcacagcgccacggccagcaggatcccctggcagaactaccacctgaacgactggatggaggaggaataccgccacatcccgggggagtacgtccgcttcaccggctacccctgctcctggaccttctaccaccacctccgccaggagatcctccaggagttcaccctgcacgaccacgtgcgggaggaggcccagaagttcctgcggggcctgcaggtgaacgggagccggccgggcacctttgtaggggtccatgttcgccgaggggactatgtccatgtcatgccaaaagtgtggaagggggtggtggccgaccggcgatacctacagcaggccctggactggttccgagctcgctacagctccctcatcttcgtggtcaccagtaatggcatggcctggtgtcgggagaacattgacacctcccacggtgatgtggtgtttgctggcgatggcattgagggctcacctgccaaagattttgctctactcacacagtgtaaccacaccatcatgaccattgggacgttcgggatctgggccgcatacctcacgggcggagacaccatctacctggccaattacaccctccccgactcccctttcctcaaaatctttaagccagaggcagccttcctgccggagtggacagggattgccgcagacctgtcccccttactcaagcactaatgctggcccattctttgagaccttttctccttctctgcctccctcaagatgagtgcccgggcatgagaagcacatggttccatgagcaggacccatctctcttctgtgaagatgcgttgggctgcaagtaacagaaatctcagtgaacagtggcctggcgtggtggctcatgcctgtaatgctcgcactttgtgaggccagggtgggtggatcacttgaggtcaggagttcaagactagcctggccaacatggtgaaaccccatctcgactaaaaatacaaaaattagccaggcgtggtggtgcacacctgtaatcccagctactcgggaggctgaggcaagagaatcacttgaacccaggaggcggaggttgcagtgagccaagatggtgccgctgcactccagtctgggtgacacagcaagactccatctcaaaaaaaaaaaaaaaaaaaagaaaagaaaaagaaatgaatgggttcaaagaccataatcatgcatatcacataagaccagaagtggcccaggtccagggtcagttaatttagcggctccacaaagtcatcagtcacctgagctccatccatcttcacatgctgtgctaccatttcttagctgtatcatcccatggtcccaaaagggctgctacacatccagccatcacatgcagataattcctttcaaaaacagcagaaagaggctcgttcttgtcttggtcccttttgaagaatgaatgaaaccttcctaagccttccagcaatttccccccaactccgatgggtaggaattgtcacatacccatgtgacccgataggaggcaaaagaaatgagacttctgggattagtttagcctcagattctgcagctgagaagttgatcagccacctctgaaggacatgcagcttgcagaaaattagggtggtgttaccaaggtgaaaaggggaaatggctttagagtagacaacagagatgccctgaggggttgtgtaggttgttcactgcaggaagtcccctggttaagaaggcaagtggggtttaaacagacccacagtctactcatcaaaccaggtgtccttggcattgtgtccacccagagagctcactgttttcttttctttttcttttctttttttttttttttttgagatggagtcttgctgcatcccccaggctggagtgcagtggcatgatcttggctcactgcagcctccgcctcccaggttcaagcgattctcctgcctcagcctcccgagtagctaggattacaggtgcgtgccaccacgcccagctaatttttatatgtttagtggaaatggagttt[131 bp omitted]tctggaagtggagcctttttccagtttgcacaaatgtgccatattggcttgtagctggcatgcatccaagtccataggtcctgcctcttcaatcctggctttctagggcctgggatgatcattgctagaactgagagaccagcctggctcagtgaacttcagggcgttccgttcattctttcagtaaatgtttgcagcacatgtgttacatgtcaggcagtgaaaccccccacagcagccttccctctcagaggatacatttgtaaccattacacagtcatcaaaggaataattttttttaatcaccagtgtgcatacagtcatggagttgggtattcccagctaccagggaggctgaggtgggaggattgcttgatgccaggagttagggaatatagtgcaccgtgattggacttgcgaatagccactgcactgcggcctggacgacgtagtgataccctgactcttataaataaataaatgaataaacacaattatgactttgcggatgggagaaaaggttctctgagagcgtattacataagtatcacatgaactccaaaatacatcttaggccaggcatggtggctgtaatcccagcactttgggagggtaaggcgggcggatcacctgaggtcaggagttcgagactagcctgggcaacatagtgaaaccctgtctctactaaacatacaaaacattagccaggggtggtggtgcagacctgtagtcccagctacttggcaggcttaagcaggagaatcgtttgcaccagggaggcagaggttgcagtgagccaggatcacaccattgcactctagcctggacaacagagtgagactccatctcaaaaaaaaaaaaaaaattcttaagagtagatggaatcctattacaagtctggatcaaaaaggcagctttggctgggtgcagtggctcacacctgtaatcccagcactttgggaagctgaggcagatggatcacttgaggttaggagttcaagaccagcctggccaacatagtgaaaccctgtctctactaaaaatacaaaattagctaggcgtggtggtgcatgcctgtaatcccagctgctagggaggctgagacagaagaatcgcttgaacctgggagatggaggttgcagtgagctgagatcacaccattgcactgcagcctgggcaacaagagcgaaacttggtcaaaaaaaagaacaaggcaacttttacaacgattttttagatctcaatattacagtattttctccagactacccacaaatacatactgtgcacctatcatgtatcagaaagcaatctaggagatacgatccctgctctcaagacggcattaacaaatcacttcaaaatataattggtacaggccaggtgcagtggctcacgcctgtaatcccaacactttgggaggccaaggtggcagggtcacttgagagcaagagttcaagaccagcttgggcaacatagggagatcctgtctctacaaaaaataaaaaactaactgggtatagtggaatacaactgtaggaccagctactcggaaggctgaagtgggaggatcaattgagcccaggagtttggggcttcagtgagccacaatcacacctgtgcatagccactgcattccaaagtcgcaacatagcaaga[143 bp omitted]aaccctgcctctactaaaaatacaaaaattagctgctgtggtggcacgcacctgtagtcccagctactcgggaggctgaggcaggagaactgcttgaatccgggaggtggaggttgcagtgagccgagattgtgccactgcactccagcctgccagtagcgcgagactccgtctaaaaaaaaaaaagataattgaaaagatacaattagatcctgaggcaagcaggtgctatggctcacatctgtaatcccagcactttgggaggccaaggtgggtggatcacttcagatcaggagtttgagaccagcctggctgacatggtgaaactctgtctgtgctaaaaatacaaaaattagccaggcgtggtggtgcacacctgtaatcccagctactcgggaggctgagtcagtagaatcacttgaacccaggaggtgaagtttgcaatgaactgacatatcgccactgtactccagcctgggcaaaagagcgaaactcaagagagagagagagagaaaagagagaaagaaaagagaaagaaagaaaagaaagaaacaaagaaggaaggaaggaaagaaagaaagaaagacaaagaaagaaaggaaagaaagaaagaaagaaagaaagaaagaaagaaagaaagaaagaaagaaaagaaagaaagaaaggaagaaagaaagaaaaaagaaagaaagaaggggaggggaggggaaggaggccaggtgtggtgactcacgcctgtaatcccagcactgtgggaggccaagaccagtggattacctaaggttgggagttcaagaccagcctgaccaacgtggagaaaccctgtctctactaaaaatacaaaattagccaagtgtagtggcgcatgcctgtaatcccagctactcaggaggctgaggcaggagaatcgcttgaacccaggaggcagaggttgcggtgagccgagatcatgccattgcactccagcctgggcaacaagagtgaactccatcaaaaaaaaaaaaaaaaaaaaaagaagaagaaggaaagaaggaaaaagagaggaaggaggaggagaaatattttttccagtctacacaatgaacatgactatatccttttggggagggagtacgtttataatataaattagtaatttttggtattttgatgttggtggtctttttcaggcctcatgatgtaaatatccaccttctgttgagatcagaggaaagaaggaaggtgctgcttggggttccccatctgatcccccttggtccagccctggttttcctgaggcaggagggagggatgaagtctttggagaagagttgggtgttgggcgctcggcagtgccggcagtgcaggaggcaagcctttcagttaggctgaaggttcagacaggcaccccaccaagccggcttcctggccctgactccttggggcagtgcagggaccacgtgcaccctcagctcaacagagcccactctggatgcaggcgagatgcggaaggtgcaatggaggcaggtggggggcctggcagaagctgaaagacgagtgcccgagacacagagagatgagcgcagagactgacagggatgacggatgcagcagggataaagggcaggagggagttggagacagagatagggaggagagaacagccagagggcaaatcagacagagaacagagaagagatatgaagacagaaccaggacagagtgacctgagtcaggcagagatggggacacattgatatggagagtgatacagtcagaaaagtctctgggccaggtgtggtggctcacgcctgtaatccctgcactttgggaggctgaggtgggaggagcacttggggtcaggagttcaagaccagcctgagcaacatagtgaaaccctgtctctataaaaaaatgcagaaatggctgggcatggtggtgcacacctgtaatcccagtactttgggaggctgagactggagtgcagcggcgtgatgtcggctgaccacaacctccgcctcccggattcaagtgattctcctgcctcagcctcccgagtagctgggattacaggcatgcaccaccacacccggctaattttgtatttttagtagaggcggggt[136 bp omitted]acagtgctggtggcgcacccaggtgccttcagattcctcttgccagttctgtgcacccagcccccagcttgtgtgcttggtgtattaatcatgcctttgtattttctgaacttctgctgctttgacaagtgcgggcctcgatgactctggagggactgaccctcccagggatagccaaatgctagagatagttaactactcacctttcctatgtaaaccagccaatccagagcccacaccccatccacacctttatgagcacaggctccctgagccaggcaccaaaaactcaggacagcctctatgctccagagcctgctgaaattcaaactaggtaatctcaaacccacttaccttgcctcttctggtcttttttgttttgttttgtttatttttattattatttctttgagacagagtctcactctttcgcccaggctggagtgcagtggcgtgatctcggctcactgcaagctccacctcctgggttcaggccattctcctgcctcagcctccccagtagctgggactacaggcgcccaccactgcgcctggctaattttttgtatttttagtagaaacggggtttcaccgtggtcttgatctccggacctcgtgatccacctgcctcggactcccaaagtgctgggactacttttgtttttttaagatggagtctcactgtgttgcccaggctggagtgcaggcatgatctcatctcactgcaagtgattctcctgcctcagcctcccgagtagctggaactacaggtgtgcaccaccacacctggctaattattttttttttttgtatttttagtaga[131 bp omitted]ttttttgaaacacaggatcttgatctgttgcccaggctggagtgcactggtgcaatcatagctcactgcaacctcaaacttcaaagctcaagtgatcctcctgcctcagcctccagagtagctgggactacaggtatgaaccacggtgtttggccctgaaacctattttttttttttttttttgagatggagtctcactctgtcacccaggctggagtgcagtggcgcgatcttggctcactgcaacctccacctcccagattcaagcaattctcctgcctcagcctcctgagtagctgggattaaaggcgcatgcccagctaatttttgtatttttactgg[133 bp omitted]ttttgctgctaacaacttaccctatgacgttcttcccaggactgcccttgggctggaggttcctgggagtttatgtcattcctccctccctctgtgacccatggctcatggctgactaggggtggtatagtggcaagtctccagatgtagcccctagtgagcatgtccctgatattcacagatttgtatagtgccctcccgtatttaacgtgggcttgcctgacttgcattaattataaaatacagtggaagagaaattgtgccagtttcaagcctagtctttaagagactggtagcttctgctcctggctcttggaatactcactcttgggagccctgagctatcatgcaagaaatctagttatcccgggggagaggccacagaggaatagtgctgacactgcatggagtgtcacactgcacaacccagctgggcccagccttcatgctatccccaccacggtgccacacacatctgatgtgccatcttgtatgtgctagcccaggtgggccctgagatgactgcagctctagccaacatcacatggaactgaagaactgccctgctgagcccagtcaacccatgcatttgtgagcagtcatagatagttattgttttacaactctaagttttggggtggtgtgggtttttgttgtttgtttgtttgtttgtttgtttgttttgagatggagtagcactctgttgcccaggctggagtgaagtggcatgatctcagctcactgcagcctccacctcctggtttcaagtgattctcctgcctcggtctctcacgtagctgggattacaggctcccaccaccatacctggctagttttttttttttttttttttttttgagacggagtctcgctctgttgcccaggctggagtgtggtggcacaatctcagatcactgcaagctccgcctcccgggttcacgccattctcctgcctcagcctcccgagtagctgggactacaggcacatgccaccatgcccagct[138 bp omitted]cccggcccagtttttatgtatttttagtagagatgggtttcaccatgttggccaggctggtcttgaattcttggcctcaagtgatctgcctgcctcagcttcccaaagtgctgggattacaggcgtttgccactgagcctggtttgttgtttggctataataagctcaaacagggagatacaaaggcccagttccatgtgtcccaagacaggaaagactccacaacttaatttgtgctctggagctccctgcaggattaggctgaggttggaacttcacctgaagtcacctcttgctcctcttcccctttgctgtcctgttttccccactcttctgctggtttctcctgggaacatttctttctttttctctctctctttttttttttttaagatggagtttagctcctgttgcccaggctggagtgcaatggagcgatcttagctcaccacaacctccgcctcccgggttcaagcgattctcctgcctcaacctcccaagtagctgggattccaggcatgtgccaccatgcccagctaatttttttttgtgtgtgtgtgtttggtagagacagggtttcaccatgttggccaggctggtctcgaactcctgacctcaggtgatccacttgcctcagcctcccaaagtgctgggatcgcaggcgtgagccaccgcacccagccagaacacttctttaataaatgactggcatttatatcttgtctcaggctctgcttccaagagaagctgatcttagacctgatgcttctaattttttcatctccaaccagaacccagggaggtcagggtccggctcccccattctccctctccactctttcttgctcctctcctgcatccaaaaggcataaccaccttccaggctccccaaacaacagggagccatctaccggggtcgggggcatgtaagaacatccatgaggtctctgaaggaagcagcaagcagcttgtttgccgtggccagcagcaaaagaagccccccaaccataccacgccggagggggatcataaggaggccaggtaggcaaagttaaggcagttgcatgtcagcagcacttcaggaggcaggtggggttggaggttgtctccgatcctgtgtctgcggtaggaggggctctgctggtagttccctctcctcccacaaggagcttctctccacccccatcagttctctgtctctgtaaatcctagaatccatcaccatggatcctccagcaggtcccacagccggctgctgctggagtcagataagtcagcggagaagatgctggggggtgggggaccagaacccagaggaggacccccgctcagggcctccagccagtccagggagtccgtggggtccctgggagaaggggaggaggagttcgtgggagacgggagtgaagaggagaaaacagatgagaggccttcagagtccggggagggggacagcacgtcgaaggagccagggaagtccaggggaatagggggcagggggtctgcgggataaagaatggtacatgagcttggaaagtcaggggtccgggcgccagccccccataccccatttccaggatccagctccccagctcacgcctcccttggacgcaggagtccagaacctcagcccccacctcccctaaatctagcagtttggatcctaccatcaggctccacctgatcctccaggatgtcatcgatgccccggttaggaagcaactgcggatggagaaatttggcgtgaactcgggactgcgacctggacctgactggagaaccctagccggattcaacccacaccctcttacctgcgccctccggatcgcttcctgcagctcctcctccagagtcagagccgctgagcccggccctgaggaaggggtcagggctggagctgcagcaggagccggagtgggagttggagccggagccgtccccggggtatccgcggcacgtggaagaggtggcctgtgagatgctgcgctgggcttgacctagagcagccaagagggcgagcgcccataagccatgcccacagggcgcaaccccacccactcgcaacgtgtggctccaccccttgatcctctcgcgacccctcgctcatcaacccctttggcctcgccccctattctttcattggctcctcttctctaaagatccgccccctgttagtctgaaccacgtcccctcgccttcaaggcttcctaccgctggtcctcgcccccacacttcattggctagttttttcgacaccccgccccggcccactttgctttctcttcattggtccgcaagctcatagccccgccctcaccgagccctgacgccgggcggctgccagggccttgggcttgaggcgcggccagggagcacccgcgggactgtcctcgcgccgcggcttcggccgctcgcggggcggcgcgccgccgcgcatgcgctccaggagcatagacttggtccccgacactgggaggccccgcaggcgcagctgctgccggagctctgagacctggggaggggcggggcgtgggaagaggcagtgctgggcgggctcccgggcgcaggcaggagctggacaggatatttggaaaccgagaaaggaggcactgggggtccggactcctgggaccctaaaacaggatgggactgggtacccgatctcctggatttccagagggcagaggctgcggggttggaattctgggaccccaccgaaggagagagaaggcctggaaagttacaccccaaactcaccgtcagctcctccagtttaagggtctgaagttccaacttgtgtggggggggcgaggggctagggactcctggtgggcagggagtgaggggagagggcttcatcctggtgataatcgtgaggggcgaacaaaggttagagaggtagagggggaaaaggcgttctggggtcctcaaagacggggagctggggaagatgcagaaaagtgagggtccagaattctgggtctccaagggcgcaaacatggggctagatttctgtgcatgggggaggaggaactaggcgttcagactcgggtctgaagggcgaagggaggggctgggatcctggactcttaaaccctgggagaagagagggttgggggccccaatcccctaatcttggactcgaggtttgagggaggaggatgctgggacctgaatttctgggtcccgggagaacagaagtgggtgtcatacctaggatgtggctgctgcgagtctgtcccttcccacagagatggcccaggaggacccagggcggacccctcggcttgggggtccgccctggatccctgtctcggctctgggggcatgtactggtggtatgtcaagttccccctgggcttggactccctccaacgttgggagatcttgggagactcctgaaagagcaggtgtgatgttttaggcttcagcgcggctcccaccttccggccccaggactacatgcaaagtatggggtcagctcggtgccaccgaagaggagcaaaaatggcagcagcaacaagggagacaaagactaggctctcagagggacctctccctccagtcgagactcaccttctttggggacctccaaggaggacaatattctggctcggggagcaggaccccagggctgaagaggaaaggggccgtgcccgagggcaaggccggggccagaggagggtctgaggctgagatccacgggtccggatccgagactggagagacggtgaaggaccctgagaggcctgcaggcagcaagccaggccgggaggagcaaggctgtgtggaaagcggggctccagggtgccggagggcaggccagggagcaagacttgattgctgggagatgggcgcctgaactggatctgagggcggaggtgtgggggggctccggttgctacattctcaagtaaagcaggaattttctatcacaaaggggtgtggtagctgaggatcacagatgtctgaggttttgctaggacaggggtggggcctgcactcctggttcttggggagagggagaggctgaaagctacatccaggccggccgcggtggctcacgcctgtaatcccagcagtttgggagactgaggcgggcggatcacttgaggtcaggagttcaagaccagcccggccaacatggtgaaactccgtctctactaacaatacaaaaattagccaggcgtggtggcacgtgcctgtaatctcagctactcaggaggctgaggcaggagaatcgcttgaacctgggaggtagaggtttcagtgagcttagattgagccatgacactccagcctggcgacagagcaagattccatctcaaaaaaaaaaaaaaaaaaaaaagctatatccagagcttctcatgtataccaaatgtggagaccaggatgcctgtcttctccaaagaagcaggatccaagttcaagcatctcattagggtggagaagcaggaagcagagctcctaggggtggggtggccagagacctggaccctggatccttgggaaaggacaggatgggattttggtctgtcccaggggatggagactgagctgcaggaaccaatgaggggtatctggcagctgtattccaggatatcccagtggggagtggggggtcaccatcccctcccttttggggcccatacttactctgctcctgattccgtctgtggatccgaagctggaggactgtggagggaggagggaggtgggaggaggaaggcgggaagggagtgtccaggagcctggcctggcaggctggtgggagctgcagttgttggcgggatatgcgtgcccagcccccttacacagcctgtgcaggcgggtgggcgggcagcaggctcccttcctcgggcctcccgcctgctccctgccagcgcagcgccgcgggccagcgccattctggggctacgagccagccagcgtgcaggctggaggcagccctgcccccggctccacctgccccctccatgagcaagcgtgtgcccaccccaccccctgcgcaatcgctatcttggcagcctggcccctttgcacctcgcctccctttatccatgcactcctgctactttctgtgctatctcggggccttcccacagtcaacactctccgcatatccacattttcagtatgcatctctctgggctctagttttgcacacatgccatttttacgcacttgcatgtttttgcagactcttcatccttgactcactctgcctcagcatccatgttaacactgtttttttttcctttttttaatttgttttatttttttagagacaaggtctcactctgtaacccaggctggagtgcaggggtgtgatcatagctcactgcagccttgaactcctgggctcaatccatcctcccacctaagtctcctgagtacctgggactacctaaatttttttgttttgttttttaattttttgtagagacagggtcttgctgtgttgcccaggatgaatgttaactatcttttttttttttttttttgagacaaagtctcgctctgtcacccaggcttgaggacaatgtcacaatctcagctcactgcaacctctgcctcccaggttcaagcgattctcctgccttaacctcccaagtagctgggattacaggtgctcaccaccacacccggctaattattattattattattttttgagacagagtatcgctctgtcacccaggctggagtgcagtggtgcgatctcagctcactgcaacctccacctcccgggtgcaagcaattctcctgcctcagcctccccagtagctgggactagaggtgcacgccgccacacccggctaattttctgtattttagtagagatggggtttcaccgtgttgcccaggctggtctcgaactcctgagctcaggcaatccgcccgccttggcctcccaaagtgctaggactacaggcatcagccaccttgcccggcgtcatttttttgtatttttagtagagacatggtttcgccatgttggccaggctggtcttgaactcctgacctcaggtgatccacctgccttggcctcccaaagtgctgggattacaggtaagagccaccgcgccccacctggatgaatgttcactttcttatgtgcacagtcagggtttgtcccccaatttgggagcaaggatctctctgcacatttctgcttttctctggacatatgcgcctttttgtatactccttgctctttgattgctggtgtctttgtacccatccaaccacataggcacgctcacgtgcacactcaagtaccctttgccttctcaggaactgatctgtagttcgaaacacttgcacacttcttttttttttttttttttttttttgagatggagtttcgctcttgttgcccaggctggagtgcaatggcgtgatctcggctcaccgcaacctcctcctcccgggttcaagcgattctcccgcctcaacctcccaagtagctgggattacaggcatgcgccaccacacccggctatacttgcagactttttgcctgccctgggacctaaaacaagacctttgacactttcacagcttgacagctcattgtcccctcacccaaactcccacactggtcctctgaggtccctcctctgctcttctgcccctgcgtgtgcgccagtataagcctttgtttctcttcagtgcttgagccctctgcacgcctacccctggcctccaatccccattgctccccccgtgagcatgctactagccatttgcacactcgttgatccaccacagccggacccctgtgcttgggcctcctttatgcaacatgaccttttgcacaaaaaacacaggcctcatgggacctaccacccctcccttcccaccccagagtacagcattctcaggatcccatcccccacgcataaagagagccctctctcaccagatcggaacttggagcgaatgatttgggaacgctgggaggaagccgccagggtcattgccaaggccgggatggggacctggacggagagggggcagggcaggggccccatagagggctggctcagagtggaggtcaggaggccgcccctgagagtgaattcagcagggaaagggcccgaaggaggtgggaataggagcagccttgggccataacttccggatcccaggggctgtagaggagggggctgcacacccggacaccttgctccgaggaaggaggaagctggggacccagacacctggtctgaaagacagggctgagggtctcaaccctgggatcctgggaggggagggacctggaatctgggactcctgggtcctgaggaggaagggttgcgggttgggacccctgtgtctaggaaagggaggaagcagaggggcctggagtctggaatcttgaaggagaaggaggttaagggctggaactcaatactcttaggagatgagaatccaagatcctgggtggagaggggaacggggccctgacaggtttctgaggaatagaagggcccctgtgacctgcatctgagaaggagtgagtagggtgtcagccaccaggttctctggggaagggactgggaccagagaggggatagaaccgttgaggagtgcgccccccccgtccaccccaggggcttctcaccaggtgggctcggcgaagctgtgctctggggcgggttgagtctagaggccgaggctggacaccacaggctccgccccaccagcctgggaccgcctccaacccaccttcctggggtgtgacgggagccccgccggggaccctgagaaggggtgggagcacccgctgggagggcctgtgcgggccttgggggatgctggggggtgagagcggggacgtcagggttccccggctcgctcctcctgcacgtcctggggttgtggggtcggggggaacggtggcaggcggactgacagaagcaggtgcccggagaggggcgccgggtgagcagcagcggcaggtggtcgtgtcctggccctaccggcaggtgccacctgtcgcctactttttccctgacgcagcaactggagtcaagttcaggggagtgaaaagttcaaacggggggcccagattcctggatccaagaaaggagagggatggggacctggagtcctgggtttaaagaaaaagaggcaggggcctctggggtgttgggaacagggacagaggtgttcggattcggcggtgtgcccggcaggcagaaaggtccagagggggctggggacttagattcctgggtctgagggaggagggggctggagtatggatttgggggggtgtcgaagggagaatcgctggttcccactggcaggactgagggccttataatcggcagagcaagcttagggccgtgttctgaggggtgtgggaggctcctctgctcttgggttggattacatgcaaaagggcgagccaaggccgtggctataaatacctcctcagactcggcaggggcccagacaagggccctgcaaccttgttctgcagaaaatcatcattagcgcccctgagtcttaacaatcgaggcgctgccgataccacggatacctttattgctccctggcattcacatcctaagcccatgctcccaccgtcccatccgctacttcccgaaaactcaatctcccaacattccacgcgggataagaactacaactcccagaaagctttgcgctcaggcgggctcctgtccgtagaagcccgtgacatttcaaggttcgcgcgctcgtttggtattggttctcaaggagacgtggccacgggaggcccatggcgataattggctggcagctcctgctgctcaagatcccagaggaggcggcggagcctacggagttcacggtgcaaggcatcgtccgtcactggaccagtgaggcgcaggcgcgagctccccagggggaggatgaggggcgggtgcgaggagaagctttcgaagatgtcccctgtgaggccgaaggcggcgcggttagagtctgaaagtgggagtgaggtagttgcatcgggaagagccgaggctgcgtcacacccaaaggaagaaaaaaactacaaaccccagcaactcctggggcggggtccgttcacacgctactctaggagcccctgggcatgatggaagttgtagttcagacgatggaaggccaccgttgcctgggaaacggcttcccaaatccccgagaaagggctgggaacttgccttacagattcctaaaggtggaggagtcaagttcaggggagtgaaagtcccgagacctggactcctaggggtggtgggtgggtggctggtggagggaatggactagggatgcgaaccccagagaataaagggagctgggggcttgaactcctgtatcttgacgggggaaggggctgggtcctgcacttatgtcctggtggggagggacaggggtccagaatctggggttagaaggaga[140 bp omitted]ccccgtctctactaaagatacaaaaaattagccaggcgtggtggcgcatgcctgtaatcccagctactcgggaggctgaggcaggagaatcgcttgaacccgggaggcagaggttgcagtgagccaagatcgcgccattgcactccagcctgagtgacagggcgagactccgtctcaaaagaagaagaaagctgacagccccaatgctgtatcccattgctcctcacctgtgtccacagcctcccgctctgcagggggagggtcccacgcggctggcggcccgcggccagggcccagctgatagtggctgagcagatggtgcagctgggcgggggtcaaggtggggtggtcggttcttaggctgctccatgaagcctggtgggaagaccaggtgagaggttgatggtcattacggggcagttaagaaatgaaatggaagggcttccataaggggagtgggtgtggtgggaagataatggcatctctgcagtgtcttctgggcactgtgaagtctgtttatcaccaaagtgatggtggggaagggtgtgctcccagcaatttgtaaaaatgtgatgtgcctcaggataattgaggatacaggaaatgagtagggtggaaataaataagattggccattcgtttatattattgaatctggcgatggtacttggggattttttttttttttttttttttttgtccttaaagagacagggtctcactccgtcgcccaggctggagtgcagtggctcgatcgtggcttgctgcagcctcaaactcccggctcaagtgatcctgggctcaagtgatccttggccccagcctccagagtagctgggactacaggcacacgccaccacacctggttaagtttttgtagagatgggatctcactatgctgcccaggctggtctcaagcttctcaaagttctaggattacaggcatgagccactgcgcccagttgggattcattattctatggcggccactctatatctgtttgacaatgtctacacctgatgtagctgacgtcagaaccatcaatgtgcttaacatcagagactccacctagactgcctgagttcaaaaatcccaggtgggtcacttattaccttccggcaggtcaccgtcccctagtctcctcatccataaatttggagaacaggaactatctaatagagttggtatgaggatgcaatatggcaaaattgtaaagtacttggaacactgcctggggcttattaaatgcatggtaaactttctttcttattgttttgagacagggtcttgctttgtcacccatgctggagtacagtggcatgactgtggctcactgcagcctcaacctcctgggctcaagcagtccttccacctctgcttctggagtggctgggaccacagacgtgtgcctccacacctggctaatttttaaaatttttggtagagatggtgtctcccctatgttgccaactggtgtcaaactcctgggctcaagcggtccttccacctcggcctcccaaaatgctggcattacaggcattagccactacgcccagcccattataaacatttgatataaataaataaatgtctatggggaacagtttttg[143 bp omitted]gaaaccctgtctctaccaaaattacaaaaattagccgggtgtggtggcgcgtgcctgttatcccggctactcaggaggctgtggcaggagaatcgcttgaactcgggaggcggaggttggagtgagccgagatcatgccattgcactccagcctgggtgacagagtgagactccgtctcaaaaaaaaaaaaaaaaaaaggaaaaataagtgaaatcaagcgacctgtcctacctgattctgtttcctcatccaaaaaacagtcagtcacctacttcgatggggctttgtcagcattaaactagaagtgctaaacagggtgcctggcaggtagttcatgttcaatgaatgttttaatcatcatgttcctttgtctcataccacactttctgactcagcatgtctgagtgagggaccctggaaactttttttttttttttttttctggagacagggtctcgctctgtcgccccggctggagtgcaatggtgcaatcttggctcactgcagcttctgcctcccaggttccagcgattctcctccctcagcctccagagtaactgggattacaggcgtgcgccatcaagcctggctaatttttgtatttttagtagagacagcgtttcgccatgttggccaggctggtctcaaactcctggcctcaagtgatccacctacttaggcctcccaaagtgttgggattataggcgcgagccactgctcctggcctggaaactatttttaataagttccaccaggattcagacacagccgagtttagtcattgttggtgctggcttccttctacctgccaatgtgttacccacagtgtctgagctggggctggggatggcatggggttcaaggggagctctgacggtgagctgaatatagaaggtggctgaggggggttgaggagtcagaggtcaggggtcaggtatagctgaccaggagtcaccttgagcagggaagtgcggggcacacagagcaggttcacagccatggagagtttccggaagaactcagtggcaatgtcgcccagcccagctccctgtagccagtccaagacgaggtccaggttggttcggatttgaacagctcgggaccattgatagaaaggccggccttgacctgtgggtgttaaaggtatgagaggcagttggttggctggactctgtgctcctgcctcccagactcttcctatccttcagcctgggatctggagcttgttctccagggtacccaaaggtgaggcttgagcccgtggtgtgtctaatatgacctgagtctcagtggctcctgtctttgcctccctgacagctcccagccaaccttcacctcgttccatcagcgagttgagaagggatgcgttggagaagaagaacaagtagccaaaagtctgagacacgaggtcagggtgcagctcgcactggctggtcagctccaaggctgcctggaacacgcccagggtaggtctcaatcctggaggcatggcccccagctccgcgccaggccccggcagctctgcaccagctgtgaaagggttactatccaggagagcaggcagcgttgaatagagagtctgagaaaatagagaagtggaaacaagtgattggactacaactcccaggaagcttcagggtaatagagcatgaagatagtggggagctccaccaaagtcttctgggagttgtagtccattctacagtcaacacccaaagggtctccgtgagcaaatccctacttgatagaagggtatacaagtttctcgagtattttaagatcacctcttgtgcattgtgggacttgtagttctcagcagagacagctcaaggaggacaaaggatactggacaaagagttccctttcagtcaaagaattattcatcctgaattcccaaaggaaagaaaaagaatggagagtcaggaagtgggagtgggatggcagtttgccagtggaaaatgagatcaggccaaggacaggaaatgaggtcagaaacagaagaaataaacgcacacttggcaggaatgtacaggaagtgaaggaggaaagggcttcacaatccaggctgctagaggaacttagagactgatagttagctgtcccaaaagatcctctctcattcttgcacatagggcatcaagcccaccataagccagaaaccctgagaatgccaagaagtggtgttaaggtcaagggtaatgggggggaaactggggcagaaagcaggcccttccaggaagggcactcagagaaaaagatctgtcgttctgaaagggaagtgaattcagagctgtaggaagtgaggtcagcaagcgaaggaagtggggcctgatgaaagaggatcttcagtttaaatcacagttcctggcactatttgatctctagctatctatcaatcatttatctatctattatatatgaaacttaacagtgactgaagagtagacttagaaagtgggagattcagaaggtggtaatggtgatgttaccaagtagtgaggtcagcctgtcaaaagtggtgatgattacttttttttttatttcgtttaattttattttacttttttgagatggagtctgtctctgtcgccctggagtgcaatggtgcgatttcagctcactgcaacctccgcctcccgggttcaagcgattctcctccctcagcctcctgagtagctgggattgcaggcacgcgctaccatacccagctaatttttgtatttttagtagagacggggttttacc[137 bp omitted]cgggttggaatgcagtggcatgaagtaatcttggttcactgcaacatccgcctcccaggttcaagtgattcttgtgcctcagcctctccaatagctgggattataggcgcaggccaccatgcctggctaattttgtatttttagtagagatggggtttcaccatgttggccaggctgctctcaaactcctgacctcaagtgatccacccgccttgacctcccaaagtgccgggattacagatgtgagccaccgcgtttgcccaggtgatgattacaaaggaaaagaagccagaaaggcaggaagtgatgtaagctctaacaagtggtgtcagaacagcaaagtccttgggtgagatgggatgtcatgtcagagaaaagcagaaaatcttgagtcaaatagtgacatcagagccacacagtgtagttcaaacaagaagtgatgttaccacaaacaggaagtgatattacgtgaaacaggaagtgatgctatgtcaaacaggaagtaagaggcaagggccaaccttggtgaggtagtagacagactgctggaaggtacacatgatgacctcatccaggagggccatggcctcatcacataattccaagtcattgcagagctgtgggtctgaggacaggcttggggttaagagggagaaccagaagtcggcagccaggagcccaggtccccaggtgcagggcatgatgggagacttggacaagcctgagcctgagtcagagctcaccctcttggtcagcctccttctccatttccagcaccttctcctgcacaaagctaagcagctccgtggtgttggccatccacagcatgagtggccgcagctccacagacacagcttcaggagtcaggggcacctcggggaccccctcagggtggcttgaaaaagaggaaggaatttgtgatccctgcccaaccctcatcatagtttacaaaccccaagatctaagtctaagtgggagagcaagaccaactcccattgcgcagctggaaaagttgagcgcaaggagaagcagaaacttgcactggggcatgcatggggtgaacacagaactagacgcaaaacccaacccctgcatccctccagaccactctgctcagaatttctcttacttttctggctgacggtctccaatttccttaatcttttcctgtggaacagtaagatcagaatcaaggtgagggggatccactgaggggcttaagagttaataccctggtttttatagaagcacaactctcatagagactggtcctacttttcttagagatggggtcttactatgttgccaccggtggtctccaactcctgagctcaaatgatcctcccaccttggcctcccaaagaactaggattacaggcatgagccactgcaaccggccttcactcttcatacggattctttttttttttttttttttttgagatggagttaccctgttgttgcccaggctggggtgcaatggctcaattttggctcactgcaacctctgcctcccaggttcaagtgattctcctgcctcagcctcccaagtagctgggattacaggcatgtgctaccatgcccggctaattttttgcatttttagtagagacggggtttcaccatgttagccaggatggtctcgatctcccgacttcaggtgatctgcccgcctcggcctcccaaagtgccgggattacaggcatgagccaccacgcctggctcttgagacaaattctaatcccacaagctttagaatggtctctccttactttttaaaacatacacaccctatgattatgagtgatctagctccttcaggtcctcttctccaatttttacccccaagaaactccttaaacctctctggttaggccctagctcaataggatggaacgtttcccccactctgaatggtttctttctggaacttccatctgtaggtccagtggatttgtgcttcctcgcctccaagaatgaactcgctcactgctatccaagctccaagcccaatgggctgcggtgaattctcacactgatctctgtcaacttctcatccagtgggatctctcccccaccatctcccataatggtttcttcctaaggtgagttcgtgcttaggtgagctctcctaaggtgagtttgggcttccctctaagtgcagtggatctacatctcccagcattctatg[135 bp omitted]cccgtcttactaaaaatacaaaaaattagccgggcgtgctggcaggcgcctgcaatcccagctactcgggaggctgaggcagaagaatcatttgaaccccggaggtagaggttgcagtgaaccaagaccgccactgcactccagcctgggtaacagagcgagactccgtctcaaaaacaaaagcaaacaaacaaacaaacaaaacccaaaaccccaaatccttcccgaggcgtcatgggaacagtagtatccagcccagctatgaaaagggttgaaggtagggaagggaggctggagaagggacttggggcgctggtggggctggacggcgattggggggcgctcacccagacggcctccttgatgagccgggccaggcggcccagcagtcgtggcaggtggcccagctccagctcacgggcggaatgctgcacgcacagcgccagcagcgtggcgggcccgaggggcggcaggtctcccgagccggcggctgcggcgcgcacgatctcgcccagcagcgcctcctcctcgcgcggccggaagcgcaggactggctcacggccgtccaggtaggcggccagtgcctcgccgcgctcctgcaggccgcggccgcacaggcgacaggagaaggcccagccagggcctggcggcgtggccccggggcgcgcgggcagccacggcggcctcgcaggccccgagcccccagtgcgggggtccttgtacatgaacaggaagtgctcgcccagccccaggaggtcgcccgggtgcagctcagcctcccgcagcaggaggcacccgttgtgcgtgactggggcgccccgggacgggcgcaccatggccgggtgctcagggcccgcgcgcactgtgcagtgacgcggcaggatgtccggggcgttgaggaaggtgtccacatagggagccggggaccccccgcggccagacgagttcccacctcgcccaaacacgtgctgctctcgcgtcatcacatacaccacaaagtcctggaggggaaacgaggatgcactaaggacatcacttcaatccatatcttcagatctgttctctctgttttctacaacaacttttctattcccaccaactttttttttccttcttcttctttttttttttttttttttttttgagatggagtctcgctctgtcctccaggctggagtccagtggcacgatctcggctcactgcaacctctgcctcctgagttcaagcaattctcctgcctcagtctgttgagtagctgggagtacaggcgcctgccaccacacccggctaatttttgtatttttagtagggaaagggtttcaccatgttggccaggctggtcttaaactcctgatctcaggtgatccacctacctcggcctcccgaagtgctgggattacaggcgtgaactatcgcgcccggccccccaccgactttgaatagacactccaaggagatctggatctcaaaggactctctaagcacccgcaacgccactgagtggactcttcccaggcactttgtatggtggatggtcccataacacccatcccgaagaccggctatgtacaaggagacccccctttttttctttgagacagagtcacgctctgttgccaggctggagtgcagtggcacgatctcggctcactccaacctccgcctcccgggttcaagcgattcccctgcctcaacctcccgagtagttgagactacaggcgcgcaccatcacgcccagctaatttttgtatttttagtagggacagggtcaccatgttggccaggatggtctcgatctcttgaccttgtgatccgcctgccttggcctcctaaagtgctgggattacaggtgtgagccaccacacccagccagagacccatttcttaacatgggctctaccatttctttccctcaagcattagatgctttcaaggagatccctatttctaaaatgaactgtgcaactaccctcaccctcaaagaatggacctttccaaggaaatctccttttccccatccctggtcccacctgtccattatttcacccccaccccaccatggtaaaggcttccagatatatttccccttccaataatagtttttctcaatattcctcaagcaatgaatgggtacttttaaagagattcccttggactgggcatagtggctgacacctgcaatcccagcactttgggaggccgaggcaggtgaatcacctgaggtcaagagttcaagaccagacacggtgaaacctgtctctactaaaaatacaaaaattagccaggcatggtggcgcatgactgtagtcccagctacttgggaggctgaggcacaagaatcgcttgaacccaggaggcagaggttgcaatgagccaagatcaggctactgcactccagcctgggcaacagagtgagactcaaaaaaaagaggccgggcgcagtggagaccaaggccggcagatcacctgaggtagggagttcgagaccagcctgaccaacgtggagaaaccctctctctactaaaaatacaaaattagccaggtgaggtggctcatgcctataatcccagctactcgggaggctgaggcgggaaaatcgcttgaacctgggaggtggaggttgcaggagttaagtcctgcaatggactcacctattattcccacccccctaacagaggatttcaaagagataatcccccttccatcaatggatgttctcaatattcctacaatggactcctacaatggactcacctattactcccactcccccaacggaggatttcaaagagataaccccccttccatcaatggacgttctcaatattccaatccccaaaaaggacatctccaaaaagatctccatacagtgggctcttctggtcattccacggataaataaatgccttcacggacaacctcttaccatggagtgttccatctcatttatcaaatgaagacaggcattccagaagacctcgtcctaaaaaatggactctcatctccattccataaatgtagaaccactcaatctgacccccttccattcgccaaccatgtctgagacaacaggcatcttgatatgcatagatcccccttctacactaaattctaccattacccctaccccatgaatgggtgtttccaaaaagactcctacctccaaaagatttgctcatctacccttgtagaaaaatgggtctttccagtcttaccaccttctgaaggtagactctcctgttcttcattcctgtctgaaggaatgggatgacccaaaataaaagccccctttctacaatgggctctcctgctccctaacccaggaagggatgctttcttggcacctacagtgaactttcacttcacagccactccatgaatcggcaaaccaaatgaattcctacaatagattcacctggtattcctgcctccaaggaatgaacaattcaaatgaaaccttttttttttaatctcttttttttttttcttttttgagacagggtctctcactctgtcatcagactggagtgcagtggcattatcttggttcactgcagacttgcagactccacctcctgggctcaagtgatcctcctacctcagcctctcaagtagctagaatgacaggcatacaccaccacacctggctaatttttgtttctgtttttcttttttttttttttaagacggagtctctctctgttgcccaggctggagtgcagtggcgcgatctcggctcactacaagctccgcctcccaggttcccgccattctcctgccttagcctcttgagtagctgggactacacgtgcccgccaccacgcccagctaatttttatatttttagtagacatagggtttcaccgtgttagccaggatggtctcgatctcatgacctcgtgatccgcctgcctcagcctcccaaagtgctgagattacaggcatgagccaccgcgcccagcctgttttccgttttttatacagatgaggtctcactatgttgcccaggcttactttgaactgccacctggaagaatatgtccttccaatttgaccaccttcccaaaagagaccttcgtgttctccagccttgtccagaggaatggctgttataatatatgcaatcctcttactacagtgagctctccccatctccttgcccccacaaggaggaatgaattcttccatacaagctctttcctgaagagagtcttaccttctcacccatatacacagtcaagctgcctaacccaattggatctttctgtgaccgtaaaaatggaactgtcgaataagctacaccaccttctttttgtttttcattttttatagagacaaggttttgccattggtcccagctgtacttgtttagcttggctgtaccattgttaaccatcagttggccacaccataaggataattcacccgatcactgcacataaatgaatatttccaataacacattactcactctccctcctggagtgcagtggtgtgatcacagcttactgcagcctagacctccctgggctcaggggattctcctgcctcagcctcctgggtagctgagactacagataggtgccactacatctgggtaatttcttgtccttttttgtagagacaagatttcactgttgcccaggctggtcccaaacttctggtctcaagtgttactcctgctttggcttcccaaagtgctgggattacaggagtgagccactgtgcccagacaacatgttacatttctattagtgcagtaacttcccactgatcctcaaccaccaatcctttcttcctcttttgtaccaatcaagttctgttggtacccagctatgtaaaatagatagaaggatcaataccacctgcctccatcaatagtggtcaaatt[140 bp omitted]catggcgacaccctgtctctactaaaaatgcaaaatttagctgggcatcatggcaggcgcctataatcccagctactcaggaggccgaggcaggagaattgcttgaacctgggaggcagaggttgtagtgagccaagatcgcaccactgcagtccggctgggtgacagactgagaatccatctcaaaaaaaaaaaagtgtgggggggagggggcagtgcactcctacgaagaaaacacaggcttatccagaacgtgatcccaggcaacaaatgacttccctgccctagaaggtggactcccctgttactccctctcaagaaatagattcaagaaatagatatttccaaggggatctttcttttaaa[132 bp omitted]tcatctctactaaaaatacaaaaaaattagctgggcatggtggcgggcgcctgtagtcccagctactcgggaggctgaggcaggagaatggcgtgaacccaggagacagagcttgcagtgagccgagatcgcgccactggagtccagcctgggcgacagagagagactccgacaaaaaaaaaaaagtttattaaaaaaatttattttggagacagggcctttgtgtgtcacccaggctggtgatggtacagtggtgccatcatagctcacggaagcctcgacctcctgagctcaagagatcctcctgcctcagtctcccgagtagctgggaccacaggtgcacaccaccacgcccggcttttttttctttctttttttttttttttgagacagagtcttgctctgtctccctggctggagtgcaatggaacgatcttggctcaccgcaacctctgccttccgggttcaaacgattcccctgcctcagcctcctgagtagctgggattacaggcgtgcgccaccacacccggctaattttgtatttttagtacatacagggtttctccatgttggtcaggttggtcttgaactcccaacctcaggtgatccacccaccaaggcctcccaaagtgctgggataacaggcgtgagccactgcgccaggcctaatttttggtagagacaggatctcactatgttgtccaggctggtctcgaacttttggcctcaagcaattcttccaccttgacctcccaaagtgctgggattatgagagtcagccgcacgcctggcggggatcttctttctacaatggaatctccttaatgaagacagtgctttcctccaactttgaataaagtgaactattccctatttcctcctccattggactctttctcagccatctactctccctctcctgtgaatctctactctggaaccttgagggaccacgccccactagagtacttgaggctagcgcgccccgggccttctgggagttgtagttttgttgctcacccaccaacagatggggtatagggctctgggcgtgcggggctggggcggcggttacctgggcgtcctggtagccctggagcagcaggaagtaggggcggttgctgggggcctggatgaggcactgagtcaactgatcgaagtccccggggtctgcagttccgatttgggcgtcggctgcccctggggccatgctaagtgcctgctgtctccgctcctgctgccgccgccgccgcccctgaaggctaagctccgacacgctgcgccgcaaagacaagttttctgagcgctccttgcctccagacccagctggggcccctgatccggtccccgggccaggactggccagcgctgccccacccgacgccgcccgggagcggttcttctgtggccgccacgaaggggcgccggtgcctgcggagagatggagaacagtgaggctgagcctggaaagacagggatagacacagagctgcagattatgagacaaagaactggttgcagagaggtgaggctgcttcccacatttaggatttaggcttttgcatattctgttccctgtgcgtggaacacctttctgtcctgattaatacccatcttgcagttttcagctcaggaatttcattcattctt[136 bp omitted]tgcctcagcctcccaagtagctgggattacaggcgcgcaccacaacgcccggttaatttttgtatttttagtatagatgggttttcaccatgttggccaggctggtctcggactggtcggtctcgaactcctgaccttgtgatcctcccgtctcagcctcccaaagtgctgggattacaggcatgagccacagcgcccagcccatttgttcttttaacaagtatttaggccgggtgcggtggctcacgcgtgtaatcccagcactttgggaggct[134 bp omitted]tggcgtgaacccgggaggcggagcttgcagtgagccgagatcgtgccactgcactctagcctgggcgacagagcaagactccgtctcaaaaaacaaaacaaaacaaaacaagtatttattgactacctactacatgcttagaactgttcaagtcactggataacagagaagaccctgccctccaggagattgaaaccacctcttcctaaacacccttccctgacagtccaagttgaagcaggtgactgcaccactgggtactctgagctttttctggacccagctggaaccctggcacacagtaggcaccaaggggaaatgagctgaatgaatggactgatgtgtttcccactaggcttgtgagatatgggagggtggaaacctcatctgtcaacgtccccactgtattccccagtgccccgaaaactgtgtggccaggctgggcgcggtggctcacgcctgtaatcccagtactttgggaggctgaggtgggtggatcacttgaggtcaggaattcgagaccagcctgaccaacatggcgaaacccccatctctactcaaaatacaaaaaatcagccaggcgtggtagtgggcacctgtaatcccagctattcgggaggctgaggcaggagaattgcttgaaccgggaggtggaggtcgcagtgagccatgatcgtgccactgcactccagcctgggcaacagagcaagactccatctcgaacaacaacgacaacaacaacaaaaaaacaaaaaggaaaatgtgtggcctacaccaggtgctcaatggatactttgtcgagggggtggcggagacaatgcttataatcgtcattctttattaagcacctactctgtgccaagccctgtgctaggccctttatatacattgaatatattatcccattgaatcctcacctaggattttactgagattaactggcacagaatgggttggaattcaaaccccagttcaaagcccatcagttgaattgctacaacattctatctcccaaaaggaagctcagatacagaaaagcgtttagaaggctccctgagcagacccgtgctttcaatgcgccaggccccacccctgccaggcgcggtccaccaccagctgtttgaccattgactctaccttctgttccaggccttccttcgcctctacagtgatatcttccttcagccccttcctttcccatgtgatcccacttggcagccaacccagcctaaggccgtcttatccaaggccggcccctcagcggctccgcccatcttagtcccagcaggcctgatctaggaacctgtattcactcactctgcaggtgtcgcccccttctatactccacccacataggccctgctcagtagccacctcaacctacttggcagagctgcctcctaccacagagacccatgctcaccacatgccaccactcctcgcgggacccaacagtttttgccccagaccacgcttttccacaagccccgccccaccacaggccccgccccacaacatgccccgcccatctgctctgcatcgctcccaagaacattgtccgtgcttactcttccggctcctaggtctccaattcctttttctttttctggaggacagttttttgtttgtttgtttgtttgttttttcgagacgaagtctcgctctgtcccccaggctggagttcagtggcgcgatcttggctcactgcagcctctgcctcctgggttcaaattattctcatgtctcggcctcccgagtagctgggattacaggcatgcgtcaccacgctcggctaatttttgtatttttagaagagacaggatttcaccatgttggcc[131 bp omitted]cagtatcaaaacagttgcactattgatttctctttctcctaattggccccaagagaccacatcaaaggagagtacagtttaagccattaagctgcaggatgtacacctaacagacctcgcagaaaccttaccagaaagtggggattggttagagaaaggaactttcaaagatcagcaaattgctagtgtcctctaacctaccacacagggcgaatcccttaggcccctgcggactcctgcccattccactggactccacaaacgctcctcaggatctactactccgcagaccccgctacacaccccacctcctccaaggcagtctgaaatgcctgcagaaggccctaaccccaattcggagccacttcaggccactccaagccaccaccagcaaccagcccccgtcccgcctaagccccaagcttggcccctgtaaaactcctgctcaatcaacaagccccacccaactctcaggcccgcccatctggccgcccccggccctgctctagctctgcctagagtccaacacgcaccgtccagtcccctcccagtcccctcccgcgggccccgcccccagccagcccgcgagtcccacaagccccgcccaggccccgccccacggaccccgcctctctggcaccgagtccccgccccagagccccgcccgccgctcaccttcgctgtccgcggccccgaaggcctcctgctccaggcgccgcgcctcctcgcggccgcgcaactcgaagcgccgcgcccagccgggccgcgcccgccacagctcctgcaccagcagcgggcgctcggagtcgcccagcacgcgcaggtgctccgcccgccactcgccgcttcccacgcccgccgccgcgggccggcccagagcgtcgcacaaagcgaaggcgtccacgcagctgctctcgccggggccaccgccggggctgcctgctaggccgtagcgctctagcgcctcggccacgagctcgcgcgccgtggagcgcgccgtggccagcacgctcttgtagttggcgcccgatgccagtccggcgccgaagatcttgaggacccccggaggcgccgtggcgcgggtagccagcgggggctcgggggccacgcccgccgccagctccggcagcttcttctcgctggcccagcgctgcgcgccccccggggtcccagggcctcctgcgccgctggaccccgtggtcccggtccccgagccccggaagagctgggagatgcgcttggcgcggctaccggaggctcccccggccgccttgacagcgcccactcgccgcagctccacgtgcggcgggggcggaggtagcggctcgctgctgcggctccccgtgtccgacgaagaagacctgggagtccgccggggaacagagtcgcgggagagagacccaggacgacacgccaagacgggggtgggggcatattaggagggaagtgggcagagacccagagggaggacagggacccagggtggatggacggggcgggggtgagggtggggacagacgcgaggcaaagagagagagaaaaaataaataaataaaggcaagtcccacagtaggaaattccaagaggtgagcagggaggggaggaaggaaggtgaatcaatccccctgctccttctgtccccgtccccgtgcccatccggcctcactccacctcctagcctagctcttactcccaccgcgccctggtatcactgtgccccaccgtctccccctgcccaccagctcgtttgcccaattcaggatgaggaccggagccaacactttgcagggactgggcagtgaacagggacagatgggaagcaggtgtgcaggggcaggagtcctgcagagatggcactcacttgacagaggctgcgctgggccagcgccgccccagcttcgccagctgcttcctgggggaattgatccacaggcccacggggagatgaagcttcccgaagcgggggcttccgccctccttccgttcaccagacagcatggccctaagggaaggcgggtaaggccccaactcctaaggcattcttgtggggatggggtggagggaacctggactccgagtcagagggaggagggggctggggctcagacttgcgagtccagggggaggagagggatggtaccctggattcctgggtcctgggatggaagatggctgggggactgagtcttggggcccagggaggaggggtttgggctgctgggtccctggctcttaccctgcttcgggtccggcacacccggaggccctggctccactggcctgggtcagttccactgctcttgcctctgccacggctcccagcactgggtgggggacaggaaaaggcaagaggaaacccggcaggaagagcggggagggggcgtcctgtgaggagaccaggcctgggggaggagatctgggtagggttggccctgccccattccttgattctggaattacatcgcagtcagttggtcccctccaggacccaagggtcccggttttctgcccttcctccctcaggccggagcccatccccagacctctcctctcggggaaccaaaggctagaatcagtcccgtcccggggagtgagtcagatgcttagacaacaagataaatctttattgttgcctcgaatctgtggccttttcttttgggacctgggtttgctcggccgctccactgccaaggccaaacagtgaggatttgatgaaatcgatcaccttccttcgacgaaatatcctaggggtgggagtggggtgcagatcatggaaccggtttgggtactaattgtgtgggggacacccctcccaacctccccctttgtgaccttattctagcaattacctaagcctcgcccttcgaagtcctcctattcaagccccccgcactccatccccaggaaagtcctgctctcaggcctcagtagcccccagaccagcttctgtgttgggttcctggaagccccgccccttactccaagccaagcctgtcttcttcaatgggttgcttacgcaaaggtaaggccggttatcagtgctagggagccgcagatcagcagccccagaaggcggcttgccagcattttctcgggctgcagaggctggaggcttatggacgactccgtggtcgcctcccccggggttacgatatttggagaaggtttttcctccttgatcattttgggcaacactgttagagaaagcgtaaagagcagtcctggcagggcgtggagttcctgccctggcaaagacaagcccgtcccagtagccggccatcccagagataatcacgccttcaacagtgtcaagcctgaacacacccaagggaacccctgtcctcggggccagaggccacgcccccggcaggaagccacaccccgtgccccgaaaccacacccaacaggaagtcacgcccccatcgccaaggccacgcccccgccgcggaccccagctttcctgggccctgaatcctacacttctctcagccccacagcactgacctgtgacgtgaaaattgatgatcgtggctgggctggaattcacagagcccagctcgcagcggtagctgcctgcatcctctggacccaccatgggcttggtcagggtggcctctttccccttggacaccaaggtctccgtattgttcccccaaacctagacccaagctcaaggggtcactgaggcctgaggaattcaggggttgggggagtacaggggtgagaagatcacagggcctcagtgtgggaggtgagtgtccagggtgtcactggtcagggcacggggtccccagaggtctgtagagaccacacctaatagaccaccctcctgggtcatgagaatcgtgggtgcaggcccatagatccagaacacaagtattgtagtctagggagttcaagggttacagaagttgaggccctcaccctgtaaaagctgtaatcagtgaggccttccgaagcctgatgccagtttaactcacagtccaggatcatgtcttccatttgaggaacttccacattccgctctgggggtgggggatgaccatgggacactcatgattctgtttttgtttttgtttttgagatggagactcgctctgtcgcccaggctggaatgcattggcgcgatctcggctcactgcaacctccgcttcctgggttcaagcgattctcttgcctcagcctcctgagtatctgggactacaggcgcttgccaccacgcctggctaatttttgtatttttagtagagatggggtttcaccatattggacaggctggtctggaactcctgacctcaggtgatctgcctgcctcagcatcccaaagtgctgcgattacaggcatgaggcactgcgccgggcctccttcacggttctttaccctcccctaatcctttacatttgttgtaacctcgtcttttctcttttctttctctctctctttttttttttttttttttttagatgaagtctcactctgtcacccaggctggagtgcagtggcgcgatcttatctcactacaaccttcgcctcctgagttcaagcaattctctgcttcagcctcctgagtagctgggattacaggtgcccaccaccatgtctggctaatttttttgtatttttagtacaaaaacgatggtttcaccatcttggccaggctggtcttgaactcctgaccttgtgatccacctgcctcggcctcccaaagtgctgggactacaggcgtgagccagcgcgcccggcctcttttttttctttttagacaaggtctcactcttttgcctgggctggagtgcagtggtatgatcatagcttactgcagtctccaactcctgggtccaagcaatcctcctgcctcagccttccaagtagctgggactacaggaacgcaacaccacacctgactaatttttaaatttttttgtagagatagagtctcgctatgttgcccaggctggtctcaaactcctggcttcccaatcctcccgtctcagcctctcgaagtgcgagactataggtgtgaaccactgcacctggcctaaaccctaccttttcttgtctactgcccccacacccccatctaggctctctctagactgcctctcctctcgccccaccccacctgcaccaattcctcctgctgggtccagttctctcacccccgcaatcgtaggactttcgacaagcgtgaacctcctttttgcagttcttgcaccagatcagagtttgcaacatcacacctggaggggcagggtcaaggcttgtatttgcccactaaggggcatggctaaaaggagaggtcagggctaagggctggggccagatcatctatgacattcctagatggtcagacgaaggcacaggaccaggacgcaggtaagtagtaagtgggctcc[135 bp omitted]cccgtctctgctaaaaatacaaaaattagctgggtgtgatggcgggcacctgtaatcccagctactcagggggctgaggcaggagaatagtttgaacctgggaggtggaggttgcagtgagccgtgatcgtgccactgcactccagcctgggtgacagggtgagactgtctcaaaaaaaagagtgtaagtagaatatgacctgctccccaagaaatccatggtgcagaaagaatactggagacccaggaacctctccaaggcagagaatgacaaaaccaccaggatccaaaaaggcgagtggggaggttgactattcagagggcaggatgagggttaacttctgtaatccagactcaccacatttgttgggacaataagctgtgtcaaaagagaaaaaaagagagcaagaaagagatgacagagtcagatttctaaatgaaagacgatggaagagggggttgggggaagagctgggctttgggcttttgggttcgagggagaaaagacttgggtctgaaggaggaggcagttggggaagctgaggaactgggcttggagaagtaaggggctggagacaaggactcttggatagtggaaagaggagctgggggacaccgactcccatcttctctcaccctctttttggaatcgagcaacataggtggcaaaggtttccttttgcaagtgcaacatccaaaatagctccttcacgaagagatcgcctgggaagacacaggaacccccaatcccacgtgtgaggtgttggaagtttacttctgcctgcagagtctggcagtctacttcctggccttctcaggaaagggcgctacaactgaccgtctaacataatgccagctgctgggctaggcaatgcatattttgggggatgggggagggtcttaccctgccacccaggctggagtgtgtggtgtaatcgtggctcactgaagcctcaaactcctggactcaagcaatccccccgcctcaaccccccaagtagctaggactacaggcacacaccaccatgcccagctaatatgtatacatatgtctattttttgtagagacaaggtttcaccatgttggccaggctggtcttgaactactgagctcaagtaatctgcctgcctcagccttccaaagtgccaggattacaggcctgagctaccgtgcccggccagcaatacacatttaaactgaacaactgaggaagcattttagagccaagggagcttcaaagtcctttgctcaaggccgtacagctaggaagtggcagagcaggcattggaatctaggcggtctgggtccacagcctagtatctgaccaagagaccaggcatcactaacgctggcttctctgagagattcgggactcccacccccttgatgcatttaccttttacatcactgtctgtgatgcgtttcagatccttcagcaaactccaggaccccttttgcagtgtggcctcatctgtcagaggagatataaccccagattccagccttactgtctcattggcgcgcctaatcttagaaactacaatacccatgaggccactgggcaaagataggcctggttaaggactcagccgcccgttgccttctgggagttgtagttttattacataaaattgccagccgaggatagggaaaacggtatttactagcctcggggaacctcggaatctgcatctcagccttctccattcccgaatcccggagaccctgctgtcagcctcttccttcccctggtcttatctccctcctttcccaggacccaggggtccgtggtcccccctgccctcaccaacgacccccatataggcatcctcattaagcgacagttcctggaaatccttcacggcattctctaccctttccatcatggctttgtgatgcttcgcatccaggtggccaggcaggtaatctttctccagggactttagcgccagcacgacagacgggtcacatataacacacccctcggcaggaagcaagcaaccggccagcgccgcacacaggagggtaaaatgcggccccattgcagccggcgcgcacagttcccgaagaccgttaggaagggtgctctcaccccaaaccgagagcaggagaacgctaaacggagaaaagccaaaatccatcttaagaaatcccactgggccgcctatccatggggtccgcaaacctcgaaaagaggatcttcaggaaatctccaaataaagaggacctatgtccttcatcaaatgcctccgaagtgtgaaactgagccccaatccaggggacccaaaatttagggttctcactgaatcccccaactgagagatcagaaaaactattaaacaggaatcactcataagtccccaaactcagaacctggaatctcccaaccccatgcgccccttcccaaaatcccaaactgtggaattttccaagtccccagattgacgtgagcctgaactccaacccttaagagcaacaccgaggcactcccccgccagccccccaaaacctgttgaacctcaagctgaagattcaatgcccaaaccaataaacatctaacacagacccaaccacgatattatcaaactcggaactccttcaaaaccaaaacacataccagattcctagaactgaggaccccactaacacttaagcgagactccatgcggtcctctagacctagggggcccttgttcacccttccccaaaactaacgggctcccaatttgcagggcgcacccttccgcttagaaaaaggagccccgatgcatcctgaacagtgatgcaccctaaacagccgctccccgaccttggttcccgatttgtggcctctaacactagggttcattgaggagcccggtccaggttctgagggcttttaaagaggaagccggggtcatgaccacctacgctaattttcccaggggtaaaatcaaggattgtgttggggacgagggtaaggttggttgcgtgaaatcgagagcttttcgacggggtctgagtcacggacgatcccctctccacaaggaactcctgaaaccaccccctccgagcttctcacgtaggggcccgaattcctttatagatattccttggggttttcctcggccccacccagaaactcaactctgtctgattggactgcaacaaagggaggtcccgcccatcgctccatgacgtcacagaggctgcagcctttttggactagaattttcccagcatctagggaagaggaagcctcctgactactctggcttccagagtcaaggaccggactcaggccttcagtttcctcccctccccttgccccaggacccaggctttgggctagatccggccccccaggccgctgccgcccccaccgcggtccttggaaacggctgtcgagccacgaagtggacattttagccctaagactacaactcccaaaatgccctggggcctctttctctgtagctgactgacgctgccaacctcatagctttccgggaaatgtagttcagtgataatccgctccctcctccgcctcttctgcccacgcggaggtcccagtgggaggagaggactgggggccaatactgacagtccaggagtgagcaactgggggctcagacgttagggtcctggaaggtctctctctcctgtgtgatagaaacagggaaccagaaaaacagggaccacaactcacacaagtccagcaacaaggggctgtcagatctaagtagggacagtactcccaatcacgagtaataaaaatcctcagggcccggcgcggtggctcacgcttgtaattccagcgctttgggaggccg[134 bp omitted]gaggcaccagaatccgagaggtgggagtttgcagtgggccgagatcacactactgcactccagcctgggccacagagcaagactcgatctctgaaaaaaaataaattaattaaaaaaaaataaaagtcttcagaagtaccccaccttttcctccactctcttacacacacacacacacacacacacacacaaacccacacacacatacacagtggctctggctccaaaaaagctacagagacacgggttagtgctgtagacttttaattcatacctcctgctctctcacccgtggcagctgagttgggaacagtactgtaacaattgtaactgtaactccctgataagcctacaggcatggggtctggatgagtagacaggggatgtgatcagagctgactatgtttaaggtttcttctttcaccctccaaaaaacagcaaggggctcctgagatctcgacaaccccgtccaccttggccagacctcgtgctcctgcctggatctgaggctgggtccagggtctgcctacctttagatcgttttatctcagacctgcccaaagccagatgtagtggttctgggagttcagggacagacagtggttagcaatgagcacggtacctgccagtttgtcacaagcacagagggtgtgtttatacctgcacacttccagaaaacagatcccagaccctcagcagcccacctgcagacaaagaccaacttccttcattgtgagaggcaacctgaactcacacccaatatatggagctcttggcagtttatgagctttaaaaaaaagtgtccctggatccctggaaagttctgctccagaagctgtaccattttggcagtgatccctcaccccacgttcacattttagcctgtctgctcaaaacaaacaaaaaaaagtctttgaggggctgtggggcttgttggacagagtcccgctctgctcaccaactaccccagcttttccagagactgtgaacagagcaagacgctggccaactagagatggtttgttttccatctcaatttttccagcaatggtggaacattcattagatgctacaattaggttgcacattcattagattcttcacttggcccggtgtgctggctcacatctataaacccagcattctgggaggccaaggtgggaggactgcttgagcccaggagttgaagaacagcctgggcaatatcacaagacctcgtctctacaaaaattaaaaaaaattatccgggccaggc[176 bp omitted]gaggcagaatggcatgaacccgggaggcagagcttgcagtgagctgagatcgcgccactgcactctggcctgggctacagagcaagactccgtctcaataaataaataaataaataaataattaaaaaaaaaatatccgggctgggcacagtggctcatgccagtaatcccagcactttgggaggccaagacaggtggatgacaaggtcaggagatcgagaccatcctggccaacatggtgaaaccctgtctctactaaaaatacaaaaattagccaggcataatggcctgtgcctgtagtcccatctactcaggaggctgagacaggagaatcgcttgaacacaggaggcggaagttgcagtgagccaagatcacgccactgcactccagcctgggcaacagagcgagaccctgtctccaaaaaaaaaaaaaaaaaactaaaaagattcttcaccttagttatctggatttccagaaccccatcctgtccataagggccctgcagggttcttcacaggcatcaaacctggtcctctctagaacaagtctccctctagaatcactccagaaacacagaaggggacttggtgaatgcttgctctggagcaatcatatgctccttcagtctttggaggacccaggggagaagtaacccctcttctagagtagaccagagggagagttccccattcctgggggcagccatctggaagtactgtagatatgggctgggaagagcaggtgggcactgtggcttctagaactgcctgccagccatcaggaaaagatgttttgctagttctagaatattcagacagttccagaaacgtcccccttctctccaactctcccaactagaatcactctggatacgggcacccatttgcttcaggaacaccacaagcttctccagaagatgccaggcctctgaagccacgtactgctggctctagaaagatcaggctacttcagaaagtctccctggctctcaaggcttagccaatgtccagagtggagacaagtctgcattaatgcccacccactcgggcaggaaggccgcctccggcttaaagatcttcaggaactcagagtctggcagggtgaagttggccaggtagacagtgtctccgccagccaggtaggcagcccagaagccgaaggtgccaatggtcataatggtgtggttgcactgtgtgagcagggcaaagtctttccacggtgtagcctcctgtccatcgccagcaaacgtcacatcgccctgggaggtgtcgatgttttctttacaccactccatgccgttgctggtgaccacgaaaacgggggcttcgtgccgtgcccggaaccagtccatggcctgccggaggtaggcgctgtcgcccaccacacccttccagcgctgaggcataacctgcagatagtccccacggcgcacgtggacgccgacaaaggtgcgcgggcggtcccctgtgcggcccaggcggagctgacccagcacactctgcgcctcttcccgaaggtggtcgtgcagggtgaactctctgcggatctgttcccggagatggtggaagaaagtccaagagcaggggaagccagagagcttcaggaaaggatctctcaagtccgcgtactcctccgacatccagtcgtgaagctgcagctcccgccacggcgtgcggctgtccacttctggggccagcacgggcagggtgatgcggaataccggggccagggcggcatgcatggcaggcaggataaaggcccggcggccgttgagctgggccagagccagcagcgtggcatactgtcccatctgattaccaaaccggccattggggtagacagtccaggtgccggagagggaagcagggtgctggggacaggaagaggaggcgttggggcccatcgcagtacccggcaggcagaagatggccactgggggtgtcaccaggcggcggtctggacacaggatcgacaggcctaggccatgtggaaagctgtcttgatggatatggaggaagaagattacagagaggacacagactagcaggaaggccaggcagagctgacgatggctccggagccacatggctgcaggggaggaaaggcgaattagcaaatgctctgaggctgaggaggggaggctgaggagggatgtggggtaagggaggcgcctggggtgcagcactccttagtcccagggaaagaggaagttaaaggtttagactcctggggctgaggtagggagagcctgagtcctaggtttcagggatgagagccttggaatttcggggcatggggactggaagacaagtggttttcaagatagccatggtttggctgggcactgtggctcacacctgtaatcccagcatattgggaggctgagatgggaggatcccttgagcccaggagttcaagatcagcctgggcaacagagcactcttacaaaaaaattttaaaattagcttggcatgggccaggcgcggtggctcacacctgtaaccccagcactttgggaggccaaggtgggtggatcacctgaggttgggagttcgagaccagcctgaccaacgtggagaaaccctgtctctacttaaaatacaaaattagccgggcatggtggcgcatgcctgtaatcccagccactcgggaggctgaggcaggagaatcgcctgaacccggggggcgggagttgcggtgagctgagatcatgccattacactccagcctgggcaacaagagtgaaactccgtctccaaaaaaaaataaataaaattagcttggcatggtggcacatgtctgtggtctcagctacaccggatgctaaggcgggaggatccccggagctcacaatgagccgcgatagcaccgctgactgcactccagcttgcgcgacagagagggaccctgtcttaaaaaaaaaaaaaaaaaaaaaaaaagaaagtggtccaggttcctacacctttcctgaaggaatctcgagtctcccctcctgtaagttccgctgatactggactcttccaccagcctgtttctcaggagtacctgtctgtgaggcgcaaaatccaccacagaggtggtgatgggaaacgatagttcaagtaaaacaagagaggctggagggtcaggagcggaaggagcatcttggttcctggaggagtaatggctggggaggtggcggagattcctagggccttaggaagacctggagaagaggttgggggtgcacctcctggttctgaaggagttgttcctgggtcccaggaacaactgagtggggcagtccccacttacccgagctgcttgcaggtggcagatccacagtccgcttttcgtggccggagcgcaccctccgcaaaggcaggccacatccggccgcccctggaacgccaggcgtccggctatccggcccggcagccctcccctccgcgcagcctgtccggactggcagcgagggcttggggaggagaggaaggagagggcgcggccgggagtctcgcagcgtccgccctcccgggccgggcggatggctggaaggtggagccccgcccgtcacttggcgccgagccccagcgccaggggctaaggcgatggcccctgggcccaccgctccccagatcggggatgcaggggaccgcgccctgcccctccgccccgtcattgacctgcgcgaaggcttcacccagggcaggctacctggcttctgagcagccgcagcatcattgcgtggaccaggagacggagcgcccagttgcaatgctggagccgggaggtccaatccgccgccctctctcttccggtgccagggcttagagtcggcccccgacacctgggtgcttcgagcctggccacgccccagcggctgggcagggcccccgcacctggtcccggcgagtggagcgatcgtccgccctctgccgcgtcctcctgggggatggagaacctgtttgccaggctgccgccggagcgcgcgagggcctccagcctgcaggtgctcccgcgcccaccagggtctccgatctcccacaccccccgcctcaccgtccacactcaaattccagaatcccagcccctagtcactccttttggggaattctagggtcccgtgccaaactgctactttccagacctgcactgcacgaaggcaaccattccaaggctggagaccggagtggaacagggtctgtttcccacgccgtcagcgggggccgtggctgccggcgccagagacaaaggcctctgcccgcttgtcacctaattaaagcattttctctggtccaaggcccacctccagcatcgccaaccccgagcagggcaggctaacgtagggtccagccctacggggctttgcgggtgggtgttcttcccctgtgaggagaggagagattgtaagaaataaagacacaagacaaagagataaagagaaaacagctgggcccgggggaccactaccatcaagacgcagagaccggtagtggccccgaatggctgggcgcgctgatatttattgtatacaagacaagggggggcaggataaggagggtgagtcgtccaaatgactgataaggtcaagcaagtcacgtgatcatgggacagggggcccttcccttttaggcagccgaagcagaaagagaaggcagcatatgtcagcgttttcttctctgc[139 bp omitted]cggtgaaaccctgtctctactaaaaatacaaaaaattatccgggcgcgtggtggagggcgcctgtagtcctagctatttgggagggtgaggcaggagaatggtgtgaacccaggaggcggagattgcagtgagccgagatcacgccactgcactccagcctgggggacagagcgagactccgcctcaaaaaaaaaaaaaaaaaggctttcactatttcttctaccgctatctactacgaacttcaaagaggaaccaggagtacgggaggaaaatgcaagaggacaaggagcgtgaccattgaagcacagcacagcaggatgactgcgggcaggcctagataatacccagcctcccacaagaagctggtggagcagagtgttccctgactcctccaagaaaaggagattccctttcgtggtctgctgagtaacgggtgccttcccagacactggcgttcccgcttgaccaaggagccctcaagaggcccttatgccggtgtgacagaaggctcacctcttgccttctaggtcacttctcacaatgtcccttcagtacctgaccctatacccaccggttgtttcctggttatattagttatacaacaaagaataaaagtaatagctaatgattaataatgtttacactaatgattgatactgtccatgatcatctctatatctaatttgtatgataactattcttattctaactattttctttattatactgaaacagtttgtgccttcagtctcttgcctcggcacctgggtaatccttccccacagactgaccctcccattcaagatacatcaatgtcaaagactcaggagtttgacttgattcccagaagtttaaccatcatctccccaggctcgggactcccagcacccagacccttctgctcacacccagcagtccaggcccccagaccctcctccctcagacttaggagtccaggctcccggcccctccttcctcagacccaggagtccaagccccctgcccctccttcctcagacccaggagtccaggaccccagcccctccttcctcacacccacgagtccagatccctagcccctactccctcagacccaggagtccagaccaaagctccctcctccctcagacccaggagcccaagttccccagcccctcctccctcagatccaggagtacaggcccagaccctcctccctcagacccaggagtccaggccccccacccctcctccctcagacccaggagtccagagccccagccctcctccctcagacacagaaggcctacccttgcacccttaggggctccaggaaattagccaacctgtcttccctctgggtgcccactccagggcctggcttggctgccaactccagtcagggactttcagccacccctccccccaggttatttcaggagcacctgcctgggcctgggatggcttctctggtgaaagaaacaccaggattgcatcagggaggaggaggctgggatgtccagggtctgagcatctgagcagggacagatgaggttgaggttggcccacggccaggtgagaggcttccaaggcaggatacttgtgtctcagatgcggtcgcttctttcatacagcaattgccgccttgctgaggatcaaggaacctcagtgtcagatcacgccctccccccaaacttagaaattcagatggggcgcagaaatttctcttgttctgcgtgatctgcatagatggtccaagaggtggtttttccaggagcccagcacccctcctccctccgactcaggtgcttgagaccccagatccttctctctgagactcaggaatgtgggcccccagcccctttcacctgggtcccagctaacccgatcctcccctccctcatcccctagacccaggagtctggccctccattgaaaggaccccaggttacatcatccattcaggctgcccttgccacgatggaattctgtagctcctgccaaatgggtcaaatatcatggttcaggcgcagggagggtgattgggcgggcctgtctgggtataaattctggagcttctgcatctatcccaaaaaacaagggtgttctgtcagctgaggatccagccgaaagaggagccaggcactcaggccacctgagtctactcacctggacaactggaatctggcaccaattctaaaccactcagcttctccgagctcacaccccggagatcacctgaggacccgagccattgatggactcggacgagaccgggttcgagcactcaggactgtgggtttctgtgctggctggtcttctgctgggagcctgccaggcacaccccatccctgactccagtcctctcctgcaattcgggggccaagtccggcagcggtacctctacacagatgatgcccagcagacagaagcccacctggagatcagggaggatgggacggtggggggcgctgctgaccagagccccgaaagtgagtgtgggccagagcctgggtctgagggaggaggggctgtgggtctggattcctgggtctgagggaggaggggctgggggccttggcccctgggtctgagggaggaggggctggggatctggactcctgggtctgagggaggaggggctggggatctgggcccctgggtctgagggaggaggggctgggtctggacccctgggtctgagggaggaggggctgggggtctggactcttgggtttgaaggaggaagggctggggtcctggactcttgggtctgagttgggagggggctttggcttgggcttctcctgggtctgagggaggaggtaggctgtgggcttggactcccagggctgggacagagccggatggtgggacagagtcgggtggtgggacagtcccgggtgggagaggtcctcgaaccaccttatcgctttcaccccttaggtctcctgcagctgaaagccttgaagccgggagttattcaaatcttgggagtcaagacatccaggttcctgtgccagcggccagatggggccctgtatggatcggtgagtttccaggaccctcctcaccacccaccatgctcctcctatatgtcgccctcacagcctggggtgccttgtcttgctcatcccccccggagccagacttgattctatttgctctgcacgcccccagctgcaacatttggaggttgaagttgtcatcagtgtttgcaagatgaggaaactgaggcccaggccggggcgccagtgacctcaatcatgtgatgtgtggatgctggagcggcctgaggctcaggttattgggagtctcgtgattcagtaacccctgctcctgcccacacggcccctgtgtgcacggctcatgctgggcacagggacactcggggaagccatggccagtaaagtgaccaggaccttgagtgctagggagacaccccgcctggcctgagagagcactgatggctccgagggctggaatgttctctgtgaagtctgaactgggaggcaggtccctgcaggagagccctggggtaaaaaacaaaacctgccttgctgttttgtttcctagaggaggggctgggggcctggactcctgggtctgagggaggaggggctgggggcctggacccctgggtctgagggaggaggggctggggcctggaaccccgggtctgagggaggagaggctggggcctggaaccccgggtctgagggaggagaggctggggcctggaaccccgggtctgagggaggaggcgctgggggcctggactcctgggtcggatggaggagaaactagggtctggacccctgggtctgagggaggaggcgctgggggcctggacccctgggtctgagggaggcagggctggggcctggatcctgggtcttacatcaggaaaacagaggaaccctgtctctgatcctgtttttgtcccctagctccactttgaccctgaggcctgcagcttccgggagctgcttcttgaggacggatacaatgtttaccagtccgaagcccacggcctcccgctgcacctgccagggaacaagtccccacaccgggaccctgcaccccgaggaccagctcgcttcctgccactaccaggcctgccccccgcactcccggagccacccggaatcctggccccccagccccccgatgtgggctcctcggaccctctgagcatggtgggaccttcccagggccgaagccccagctacgcttcctgaagccagaggctgtttactatgacatctcctctttatttattaggttatttatcttatttatttttttatttttcttacttgagataataaagagttccagaggaggataagaatgagcatgtgtgagtgtctgagggaagacatggcagctgttttgtctcccttggcccggacaatcccctctacacctcccctcacgtggtccgagggtcctggcttcccactgggcctcacttttttcttttcttttctttttttttttttgagacggagtctcgctctgtcacccaggctggagtgcagtggcgcgatcttggctcactccaacctccgcctcccaggttcaagcaattctcctgcctcagccacccgagtagctgtgattacaggcgtgcgccaccacacccagctaattttgtaattttagtagagacagggtttcgccatgttggccaggatgctctccatctcttgacttcatgacctgcctgccttggcctcccaaagtgctgggattacaggcttgagtcactgtgcccagcccagcctcacttttctactctgctaaagtgtccccagggactgt[213 bp omitted]aggctgaggcagaatggcgtgaatgcgggaggcggagcttgcagtgagccgagatcgcgccactgcactccagcccaggccacagagcgagattccatctcaaaaaaataaataaataaataaataaataaataaatataaaaataaaatgaaagagcaggacttctttctacaacccctcaacttgtgtgagcgttgtgtaactatttcatagagctacctcgataacaggggagcttttacgaggtgacacagcacactcacatcctcatgggagatgtagttttctggcatcatttagcagcaggaatgagatctgttgggcctcaaatctgggacaaggactcctgggtcctggagtaggtttggggctagtgtaacacccaagttctggggaatcagtgggctggacatctggacacctggatcacaggagaactggggactgcagacttaggcatcctggtctgagaaaaaaggggctggagggtgggagtttgggttctcaggaaaaggagctgaaacctggaattcttccatctgggtccttatgaactttttaatatttatttatttatttatcttattttgttttttttctgagatggagtctcgctctgtcaccaggcccaagtgcagtggcacaatctcggctccctgcaacctccgtctcctgggttcaagcgattctcctgccttagcctcccgagtagctgggactacagacaagcgccaccacacccgtttgtttgtttgattgcttgtttgtttgttttgagacagagtttccctcttgttgccaaggctggagtgcaatggcacaatctcggctcaccacaatctccgcctcccggcttcaagtgattctcctgcctcagcctcccgagtagctgggattatgggcatgcgccaccatgcccagataattttgtatttttagtagagatggggtttctccatgttggtcaggctggtctcgaactccccacctcaggtgatccgcccgcctcagcctcccaaagtgctggggttataggcgtgagccaccacgcctggctgcttgttttttgagacagagtctcgctctgttgcccaggctggagtgcagtggcacaatcttggttcactgccacctctgtctcctgggcttaagcgattctcagctctggagtagctaggattacaggcaccaccactatggccagctaatttttgtgtttttagtagagacggggtttcaccatgttggtcaggctggtctcaaattcttgacctcaagtgatctgcccaccttggcctctcaaagtgctgggattacaggcgtgagatactgcacccggcgtttacttttatttatttgtttgtttgtttgtttatttttgagacagagtctctctctgccacccaggctggagtgcagtggtgcaatctcagctcactgcaacctccacctcctgtattcaagcgattctcctgtctcagcctcccaagtagctgggattacaggtgtgtgccaaccctcccggcttggacttcagctgggactccttccatgggggtccttatgtaatgagcgtcatagattccagtcccggcaagcaagttgcccggtctcgctcccctcacgcaaccgagatttccatattgttcttcaagccacttcctggtaggaaggaagctggcctgggccagccccagttgctgcagccgggtgggagttgtcatcctggacccttcattttaagtccaaagttcaagtgagagaaatatcacagtcaaaaggacctaactgtgggtggccgagggtcactggagggacttgatgcccagaaaaaatgaaagtcaccatttgtagaaagggtagttttcaactctgatcacacaagcctggctcagtcaagggaaggaaatagaatttgaaatttcacaaagctcccgagcagtggtttaggtcctgggggtgactcaggtgacacgtaagttccttgtcagaagagaccgcatactgctgtcaaggaaaggcgaggtggccagtgtggaaagaggagggagcactgggcaccatcctgacccggttcccacccgcccgccatgccaggctggagaccaggagacacagacccagagggaaggtcagagcccaacatccagagagaaggggggacagggacctgatgggggggtcagagacccagagatagggagacagagacccagagagagagggagagtcccagagagagggagacagagacccagagagagagggcaacagagacccagagagagagggggacagagacccagagagagagggagacagagacccagagagagagggggacagagacccagagagagagggggacagagacccagagagagagggggacagagacccagagagggggacagagacccagggaaaaaggaagacagagactcagagagagaaggggacagagacccagagagagagggagagtcccagagagagggagacagagacccagagagaaagggggacaaagacccagagagagagggggacagagacccagagagagaggggaacagagacccagggaaaaaggaagacagagactcagagagagaaggggacagagacccagagagagagggggacagagacccagagagagagggggacagagacccagggaaaaaggaagacagagactcagagagagtaggggacagagacccagagagagagggagagtcccagagagagggagacagagacacagagagaaagggggacaaagacccagagagagggggggacagagacccagagagagagggggacagagacccagagagagagggggatagagacccagagagagagggggacagagacccagagagagggggggcagagacccagggaaaaaggaagacagagactcagagagagggacagagacccagaggaaggggggggacagagacccagagagagagggggacagagacccagagagagagggggacagagacccagagagagagggggacagagacccagagagagaggggaacagagacccacagagaggggggacagagacccagagagaggaggacagagacccagagagagaggggaacagagacccacagagagggggaacagagacccagagagaggaggacagagacccagagagagagggggacagagacccacagagagggggacagagacacagagagagagggacagagacccagagagagagggggacataggcccagagagaggggggacagaggcccagagagagggggacagagacccgggggatgacagaggcccagagagagagggggacagagacccagagagagagggggacagaggcccagagagagggagacagagacccggggagtgggggacagagacccagagagagaggggaacagaggcccagagagagggggacagagacccagagagaggacagagacctagagggaggagaagacccagggaaaagggagacagagacccagagagagaggaacagagatccacagacagagggggacagagacccagagagaggaaaggcaggcagggaagctgagaaatgtgttcaaatggggacacttcactgtacctgaggaccttgaactcccaaccctgttgtacccacttcctgtagaaggagccgctttcctcatctggacagtctggggtcccctgtctgcaaagcctgtcctaggttgctgtctcgcagggaaccacggatcctccgcagggtcaagccccccagctctggatgcttccagacctgcgtccagactcagctcccggcaggttgtacaggatgagctgcagggtgtgggcggtgagggctgccatatgcacccggagaactgcaagaccttgctcactgatattgacagaacccacactgagaagccggtctgggacgggatcactggggaatgatggggcatgatggaagcaattgaatgttgaattgggatgaatttattgacagagattccacactcaagcattggctataggggctgggagtgactctagttcgctctttggttgagtgaaatctgcatcccaaatcctttgcaaacgttggccaggtgcagcggctcacgcttgtaatcccagcactttgggaggctgaggcaggaggataacttaaggccaggaatttgagaccagcctgggcaacataacgagacaccatctctacaaaaattaaaatttcgggccaggcacggtggttcaagcctgtaatcccagcactttgtaaggc[134 bp omitted]gaggcatgagaatcgcttgaacccaggaggcaaaggttgcagtcagccgagatcgtgccactgcactccagcctggcgacacagcgagactccgtctatttaaaaaaaaaaaagaaagaaattcaactaccctggagcctgaggtgtgaggatcacctgagcctggaagattgatggtggctgtgccacagcactacagcctgcacgacacagtgagatctgtctctaaaaaataaaaaattagaccaggcatggtggcttacacctgtaatcccagcactttgggaggctgagtggggaggattgttcgagaccaggagtttgagaccagcctgggtaacatagcgagattcccgtctctacaaaaaatagaaaaattagccaggtgtaatcccagctactcgtggggctcaggtgggaggctcacttgagcccaggaggtcaaggctgcatgaggtattacggctccactgcaccccagaacaagcaggctacagagcaagactccacctaaaaaaaatttttttttcctctgttgtgtctatttcctctcatgctctttctaatagagccttcacttatgatttttttttcttttttttttttgagatggagtctcactctgtcgcccaggctggagtgcagtggcatgatttcggctcactgcaaccgccgcctcccaggatcaagcaattctcctgcctcagcctcccaggtagctgggactacaggcgcgcaccaccacacctggctaatttttgtatttttagtagtgacggggttttgcttattgaccaggttgttcttcaactcctggcctcaggtgatccgtccacctcagcctcccaaagtgctgggattacaagcgtgagccactgtgcttggccctggctagtttaacttttacttttgtacagacagggtctcactatgttggccaggctggtcttgaactcctgggctcaagccatcctcccacctcggcctcccacagtgctgggattataggtgtgagctactgcgcctgactctttgtcttaatttccctcttcctataaggacgccagtcacataggatttagcacacaccccaacccagtatgagctcacctgaacttgattccatctacaaagaccctatttcccaggaagatcacattcagaggttccaggtagacctgaagcttccaggacactattttccctcagtgcacagctctacataaatttggtcacactcttcttcttcttcttcttctttgcagacagagtttcactcttgttgcccaggctggggtgcaatgacacaatttcggttcaccgcaacctccgctgcccaggttcaagcgattctcctgcctcagcctccggagtggctgggattacaggcatgcaccaccaagcctggctaattttgtatttttagtagagatggggtttcaccatgttggtcaggctggtctcgaactcccgacctcaggagatccgcccgcctcggcctctcaaagttttgggattacaggtgtgaaccaccacggccagcctcacactcctcttcttttcctcacatttaagtgagctgtacccttaggagaaagttgcacagttagcactagggtgggccaggatagctttctgagccttaaaaatcttaaagtttggctgagaccagcctgacgaacatggagaaaccccgtctctactaaaaatacaaaagtagcttggtgtggtggtgcatgcctataatcccagctactcgggaggctggggcagtagaatcgcttgaacctgggaggcagaggttgtggtgagccaagattgcgccactgcactccagcctgggcaacaagaggtaaactccatctcacaaaattaaaaaaaaatttcttttaagtttggccaggcacggtggctcacgcctgtaatcccagcagtttgggaggctgaggcaggtgaatcccctgaggttaggagttcaagaccaatctggcccacatggtgaaacctgcctctactaaaattaaaaaaattagctgggtgcagtggtgtgcacctgaggtcccagctactcgggaggttgaggcacaggaatctcttgaacccaggaggcagaggctgtaggcagctgagatcgtgccactgcattccaacctgggcgacagagcaagactctgtctaaaaaaaaaaaagaaaagaaaaagaaaactctctgggcatggtggtgggcacctgaggtcccagctactcaggaggctgaggaaggagaatcgcttgaacccaggaggcggaggttgcagtgagccaagatcatgccactgcacttcagcctgggcgacagagcgagcccgtctctctctctgtctatatatatatatacacacacacacaataaataaataggttggctctttgctgtttccccacagtactgtattcaatatataaccactcagcacagccacctctccaatgttcaggagcaaactcttatctccttggttcttgcccccaccattatcagaaccttccctctgttttactctctgagcgcctgccaagatcagtttgggttttgtttctctattagttttcacccgtgtggagcttcgtccttccaagagggaggttctactgagtgagcacttcccagatccctggggagccaggctatttagcatctttcagcttctccaccgcaccctatcctcacctactcactggagcccctagagatttgactactgttcttgttttcttttctttttttgggggggtgggggagggggacagggtcactgtcgcccaggctggagtgcagtggcatgattttggctcactgcaacctctgcctcccaggttcaagcaattctcctgcctcagcctcctaagtagctgggattacaggtgcccccacctcgttaattttggggggtttttgttttgcttttttttgagagagaatctcgctctgttgcccgggctggagtgcagtgggctcactggaacctctgcctcccgggttcaagagattctcatgcttcagcctcccaagtagctgggacttcaggtttgcgccaccatgcccagctaatttttgcatttttagtagagacagggtttcgccatgttggccaggctgctctccaactcctgacctcaagtgaactgcctgccttggcctcccaaagtgctgggattacaagcgtgagccactgcacctggccctggctagttcttttaacttttactttggtacagacagggtcatgttggccaggctggtcttgaactcctgggctcaagcaatcctcccacctcggcctctcaaagtgctggggttataggtgtgagctaccacgcttggctctttgtcttaatttccctcttcctataaggacaccaatcatataggacttagcgcacaccccaacccggtataacctcacctgaacttgatttcatctacaaaggccgtatttccaagtaaggacacattcagcggtaccaggtagacatgaagcttccaggacgctatttccccaatgcacacctctacacggagttagtcacactcctcttcttcttctttttttttttttttttaagacagtttctctcttgttgcccaggctggagtgcaatggcatgatttcggctcactgcaacctctgcctctcgggttcaagcaattctcctgcctcagcctcccaagtagctgggattacaggcatgtgccaccacatctggctaattttgtatttttagtagagacagggtttctccatgttggtcaggctggtctcgaactcctgacctcaggtgatacgcctgccttggcctcccacagtgctgggattacaggcgtaagccaccgcacctggcctcacactcctcttctttttctctcatttaagtgagccgtacccttaggaggaagttgcacagttgacattagggtggg[137 bp omitted]aaggtgaaaccctgtctctactaaaattacaaacattagctgggcgtggtggtgcacacctgcggtcccagttacttgggaggttg[136 bp omitted]ctgcctcagcct[131 bp omitted]tcggcctcccaaagtgctgaggcacaggaatctcttgaacccaggaggcagaggctgcagtgagctgagatcacgccactgcactccaacctgggcaacagagcaagactccatctcaaaacaaaacaaaaaaactatctgggcatggtggtgggcacctgtaatcccagctactcgggaggctgaggcaggagaatcgcttgaacccaggaggcggaggttgcagtgagccaagatcacaccactgcactccagcctgggtgacagagcgagcccctgtctcaaaaaattaaatatataaataacaaataaataaataggctgactctttgctgtttccccacagtattgtatgcaatatataaccactcagcacagccacctctccaacgttcaggagcaaactctatctccttggttcttgcccccaccattatcagaaccttccctctgctttactctctgagcgcctgccaagatcagtttgggttttgtttctctattagttttcaccagtgtggagcttcgtccttccaagagggaggttctactgagtgagcacttcccagatccctggggagccaggctatttagcatctttcagcttctccaccacaccctatcctcacctactcactggagcccctagagatttgactactgttcttgttttcttttctttttttttcggaggggtggagggggacagggtcactgtcgcccaggctggagtgcagtggcacaatctcagctctctgcaacctctgcctcccaggttcaagcaattctcctgcctcagcctcctaagtggctcagattacaggtgcctccacctggctaattttttggaggttttttgtttttgtttttgttttttttgttttttttttttgtttttttttgagagaaagaatctcgctctgttgcccgggctggagtgcagtgggctcactggaacctccgcctcccgggttcaagagattctcgtgcttcagcctcccaagtagctgggacttcaggtttgcgctaccatgcccggctaatttttgtatttttagtagagacagggtttcaccatgttggccaggcggctctcagaactcctgacctcaagtgatctgcccgcctcggccacccaaagtgttggattacaagcgtaagccattgcacctggccgaaaaccaatctgtatcataaccccacggcacctgaatcatttctaagtgtacagttaagtcgcgttaagtatattcacattgttgcacaaccaatcttcagaattttttcatctgataaaattgaaactctctgccgcaattaaatcccacttccccaattctcctcccttcagctcctggccactttttccagccccatttgttgaaaacatggtggtgagctccttgaatgactgagaagcttttgtacatggacaggaaaattcacaacaatttgtttttttgttaatgatcaatgaatttttaaacaattatctttcctttaaacattcacagactacttctacagctaaaaataacaagccacaaatttcacaattgtagatttcgcctaaatatttgaacagtgattgcacatttaatcagtgaacttttcacaaatctgatattgtggtttcccttaaatgccatgaataggagaaaaacagtaatacactctgtcatacttttcacaagtctgatataccagattcttacaaatgctttaaatattttcgagaaggctgggcaaggtggcttacacctgtaatctcagcactttgagaggccaaggtagaaggatcacctgagcccaggagttctaaaccagactgggcaacatagcaaaagcccatctctaccaaaaaaaaaaaaaaaaaaattagccaagtgtggtgaagcgcacctgtagtcccagctagttaagaggctgaggtgggaggatcacttgagctggggaggtcaaggctacagtgagctgtgatcacaccactgcactccaacctgggtga[136 bp omitted]aaaaattagccgaaagtagcccagtatggtggcgcatgcctgtaatcccagctaattaagtggctgaggcaggagaatcacttgaacctgggaggcggaggttgcagtgagctgagatcacgctattgcactccagcctgggcgacaaaagcgaaactccgtctcaaaaaataccctcccagagagctcccttaccctttcaccaagtggaaacacagcaagaaggtgccagcaatgaacaaggaaactggcccacaccagacacagaatatgctgctgccttgatgttggactccacaccctccagaactatgagagatacatatttgttccttaagctacacagtctgtggtatttttgttacaacagcctgaatgccctcttccaagtcaattctcaccaagccgacattccagggcaaagcccgtgttatcttagagtttgtcgtaaccacatgaattgggttatttatttatttatttatttatgagacgcagttttgctcgtcacccaggctggagtgcaatggcaagatctcggttcactgcaacctcctcctcctagattcaaatgattctcccgcctc[134 bp omitted]ctcggcgtcccaaagtgttgggatttcaggcgtgagccaccgcgcccagtcgactcagagtgtcttatttttataatacagcctgaaaaacttgttctaagtcatagtattgtaataggttgggacatgagatgatttcacggctgtttgttccaggaccttctccgggaaacgtgtggggcatttcctctttgttacacactcagggtgagcccatttttcctctacttgtttgggtgaagcttcgccgctgtctctgccacaaagctgaccctccagctctgtgacccccttggcagctggcaccagcagcacggggccctggcagggcgctggctggcaggaggaggggtgtagggatttctcacaagaccctagttccacactgcgtcttgccaggagccagggacagcaatggctccagcttcctgttactttctgctcttccggaagtagatttccaggcccctcagagagaggtcccagactccattaggccacaccctcttggaggtgagagacccgctgcctgcagcccactccctagaggtctatttggtttgcatagtcgccgttttttcataataaaacttaaaaaaaaaaaaaagaccaattaaaacctgtaaaacaggtggcaggtgatcaggattagaatgctttgaaatcttttgttattctggaatatgacagaatgattatatttagatttggtcactttaaggatgcatgttaaaatttcaagagtgggccaggcgctgtggcacacccttgtgatccgagcactttgggagaccgaggcaggaggatcgattccttgagcccaggagttcgagaccagcctgggtaacatggtgaaacaccgtctctaaaaaaacatacaaaaatgtgccgggcatggtggcacacacctacagtcccagctacttgggaggctgaagtgggtgggtcgcctgaattcaggagtttgaggctgcagtgagctatgattgcaccattgcactccagcctaggtgacagagcaagaccctgtctctaaaaataaataaataaattttcttaacttggaaacagtcacaaacatttaaaaatttggaagtacagtacaagcaattcttattttccagaaccatttgaaagtcacatgtgcccttgaaaccccatcactacattaacacatactccagtgtgtactttctgcaaacaaggacattctcctacacaaccacagcagggccgccaaaatcaggaaagtagccttgacccacgactactctggaatcatcagacctccttcatgtttgccacatgtcccagtgatgctttttatggcaaaagaatgcagttcagagccgggagcggtggctcacgcctgtaatcccaacactttgggaggccaaggcgggcggatcacctgaagtcaggagttcgagaccactctggccaacatggcaaaaccccgtctctactaaaaatgcaaaaattaccaaaaatggatgcctgtaaccccagctactcggaaggctgaggcaggagaatcacttgaaccctggaggaggaggttgcagtgagccgagatcgtgccactgcactccagcccagatgacaagagtgaaactctgtctcaaaaataataataataataataataataaaatagccgggcgtggtggcgggcatctgtaatcccagctactcaggaggctgaggcaggagaatctcttgaacccgggaggtggaggttgtagtgagccatgattgcaccaccgcactccagcctgggcaacaaagcgagactctgctctccccactgccaaaaaaagaatgcagttcagggtcatgcactgcttctgagggcaggtctctttgaaagtcaggaaggacagttcctcagtcttccctggtgttcatgaccttggcatttggaacattacaggccggttatcgagtcgtctctccctccatgtggatttatttgatgtttcctcgtgatcggattctttggcagcacaacgactgagatcatgttgtgtgtttctcactggaagtcaggtcactcgcggcgtccacctctccagtttctgatgacatttgcttcagtcacatgatgcaagtggcatcagccggacttgtccttgccaagcaatgagagctttgaaactatactaatatcacattcctcaggaaatcttcaggattttttgttttctttttttttttttttttttttttcagacagagtctcactctgtcgcccaggcttgagtgcaatggcgcgatcttggctcactgcaacctctgcctcccgggttcaagcaattctcctgcctcagccttctgagtagctgggattacaggtacatgccaccacagccagctaatttttgtatttttagtaaagatggggtttcaccatgttggtcaggctggtctcgaactcctgacctcatgatccacccgccttggcctctcaaagtgctgagattacaggcgtgacccactgcgcctgggccattttttttgttttttttgagatggagtcttgctgtgtcgcccgggctggagtgcagtgctacaatttggctcactacttcagtctcccagcctcaagcgactcccacctcagcctcccaagtagctaggaccacaggcacacgctatgacacccagctaattgtttgtctttttggtagagacggggtttc[131 bp omitted]tagagacagggtcttgctctattgcccaggctggaatgcagtgatgcaatcacagctcactgcagccttgacctcactggactcagtgatcctcccacctcagcctcctgagtagctgggaacagaatgccatcactgcaggatgccatgcctggcccttccagttattaatggatttatttatgtctgtgtggactcatggtttcctattttattccatgagttataatcagttatatcattctctatttttggtgttcaaactcatttattttgatgctctttttatttacttttttttctttcaagacagagtctccatctgtcacccagcctagagtgcagtggcgcgatctcggctcactgcaacctccacctcctgggttcaagtgattctcctgcctcagcctcctgagtagctgggactacaggcgtgcaccaccacactcggctaatttttttgtatttttagtagagacgaggtttcaccatgttggtcaggctggtctcaaatccctgacctcgtgatctgcctgcctcagcctcccaaagtgctgggattataggcgtgagccaccgtacccggctctttatttactttttggggtactctgtatttagtcctctattttcccaatgggagccccctcaagctggtggctatgtgctttgtttgtttgtttgtttttgagacagggtcttgctctgtcacccaggctggagtgcagtgatgtgattcggctcactgctacctccgcctcccaggctcaagccttcctcccacttca[134 bp omitted]cagcctcgcaaagtgctgggattgcagatgtgagccaccgcgcccagcctgtttgtttgttttaatcagctctcaagggcttggaaaccatgcgtttttgacaggcctccattagtcacacttgagtcgttcctgatttctggtacagcaaaatgttctaggctcattttttttctttctctaaaccagctctagaatcagctgtttctccaaggagccctggttccttttagaatgggaagccaagatccaaacactaacagggctcgttgcttttgtttttgaattttgtctgctaatggatcctctcaggggacggattacatatacacacacacacacacacacacacacacacacacacacacacaccacgcacatatgtggggccaggcacagtggctcacacctgtaatctcagcactttgggaggctgaggcaggaggactgcttgagcccaagagtttgagaccagcctacgcaacatagtgaggcccagtctctactaataatttaaaaattagccaggcgtggtggtgcacacctgtggtcccagctactcagaaggctgaggatggaggatcgcttgagcccatgaggcagagtctgcagtgacgcatgatcgtgccactgcattccagcctgagcaacagagagacactccatctcaacgaacaaatatatacatgtatgtgtgtagtatattgtatatatcacattgtacctcatatattacattatatactacagatatcacattgtatattatatatccaccatgtaatatgtctattatatctattttgtgcatgttatgtatatatgtgtatatatatctacataggaggtatgtatacatagacacacatatattaggtatgtatacatttgtatatttccatatctatttctgcatattgagaacgacacatccaattcaaatccaatatctggccaggcatggtggctgatgcctgtaataccaacactttggaaggccgaggtgggtggatcacttgaggtcaggagtttgagaccagcctggccaacatagcaaaaccccatctctaccaaaaatacaaaaattagctgagtgtgatggcaggcgcccacaatcccagctactcaggaggctgaggtggaagaatcacttgaacctgggaggcagaggctgcagtgagccaagatggtgccactgtacttcagcctgggagacagagtgagactccatctcaaaaaaaaaaaaaaaaagaaatccaacacctagactgggtgccgtggctcatgcctataatcccagcactttgggaggccaaggcgggcagatcactagaggtcaggagtttgagaccaacctggccgatatggtgaaacgctgtctccactaaaaatacaaaaattagctgggtgtggtgctggaggcctctaatcctagctactcgggtggctgaggcaggagaatcgcttgaatccaggaggtggaggttgcagtgagccaagattatgccacttcactccagcctggacaacagagtgagactctgtctcaaaaaaataaataaataaagacaaattcaatacctctagttctctccctttccatatttatatctgccttttctgacagtgagaaatatgacttcattttcttaatttccttatcggtcaattctcctctatgttagccatctctcatctccacagctgtcccctccttccacctcccctgtgccctctgcacccagcttgggctgacttcccgagctacagccccccatcctattagcctaggggacttacgtttcctacttgggtgccccccactgtgctgagctgctcacatcagtaaatgcctccttcaccccactaaggccctgacaccccacttctgggccactgtgcccccaacaccccaagctggccttgcctgccccacctcaaaccttagaactttatcgttcaggaagacaaatttagggaaggggaagaatgccgatttctatttaatgtatttgaccatatcaatgttttcttttctggcctctgaagtttgagtcacggtcatgcccatgttataaaataattttccaatgcttacttctcactcgttatggtttcctatctgatactgaagactttgatccatctggagtttattcagtgggttatttttatttttttattccttccttcacttggattgaatgggttttctgtattcccgctttttcatatttacttttttaatcaaagttatatatgtacacagtaaagtcacacagtgctacgtgttcagtttaaccttccccatgctgtcccattggtaactgatctctgaattagttatagcaatgtgaaacactgggacggacccacactaaaatatcagtggtttgaacaattgtttttttttttttttttttgagacggagtctcactctttcatccgggctggaatgcagtggtgcgatcactacaacctctgcctcccgggttcaagcgattctcctgcctcagtctccggggtaggtgggattacaggcacctgccactatgcccagctaattttttgtatttttagtagacacagggtttcaccatgttggccaggctggtctggaactcctgatctcgtgatttgccggcctcggcctcccaaagtgctgagtggccgtgagccaccgtgcctggcctaattgattttttttttttttttttttacagagagatggggtctcactatgttgcccagtagtctcaaactcctgggttcaagcaaccctcttgccttggcctcccaaagcactgggattacaggtgtgagccactgcacctggccctacagttgatttttgtttctattcatgtaaagtctaactagtagaaagacagagggtcaaggactcaggctgatagcagctctgtcattttcttttttttttcttcttcttcttctattttttttggtgagatggagatttactcttgttgcccaggctggagtgcaatggcgcgatctcggctcaccgcatcctccgcctcccgggttcaagcgattctcctgcctc[221 bp omitted]ggatgtgggacgcaggctcccaggtgaaccgcaatgatccccacctcttggtatctatgccatgtgcattcctttcccacattacactagggttggcctttgtgatggatatcacagggcagaagtggtgggatgggccaggcagtcgctcacacctgtaatcccagcactttaggaggctgaggcaggaggatcacttgagcccaagaggtcaagaccagcctgaggcccccatctctacaaaaaatttaaaaattaggccgggcgcagtggctcatgcctgtaatcccagcactctgggaggcagaggtgggcggatcacctgaggtcgggagttcgagaccagcctgaccaacatggagaaactctgtctctactaaaaaaatacaaaattagccgggcgtagtgggatgtaatcccagctacttgggaggctgaggcaggagaatcgcttaaacccgggaggtggaggttgtggtgagttgagatcgcaccattgcactccagcctgggcaataagagcaaaactccgtctcaaaaaattaaaaaaaaattttaattggctgggtgtggtggcgtgtgcccatggtcccagctacttggcaggctgaggcaggagtatcacttgagcctaggaagttgaggctccagtgagccatgaccgcaccactgcactccagccttgatgacagagggggaccctgtctcaagaaaaaaaaaaaaaaggaatggtgggatatgacatctgagactaggctacaaagactgcggcttccatcgtggtctctctctcactctctctttcatcacttgctctgggagaagctagtggccaagacacgaggaatgcccaagcagcccatgcagacatcaacagccagcgaggaactaaggcctccagccaacagccctgtgagtgagctcggataggccaggctcagtggctcacacctgtaataccagcattttgggaggccaaagcaagtggataacttgaagccaggtgttcgagaaccagcctggccaacatggtgaaatcccgtctctacttaaaaatacaaaaaattagctgggtgtggtggcacgtgcctgtaatcccagctactcgggaggctgacgcaggagaatcacttaaacctgggaggcaaaggtttcagtgagtggagactgtgccactgcactccagcctgggcaacagagtgagactctgagactctgtctcgagagaaaaaaaaaaagagggttctccagcctctgtcgagccttcacatgactgcagtcctggctgacaagcttgactgaaacctgaaccaggaacacccagccgagctgcttgggattcctgaccctccagaaactatgtgagaaggccaggcaccatggctgacacctgtaatcccagaactttgggaggccgaggcaggcagaccacttgaggtcag[141 bp omitted]gcagtgggtgcctgtggtcccagctacttgggaggctgaggcaggaaaatggcgtgaacccaggagacagagcttgcagtgagcagagatcatgccactgcactccagcctggtgacagagcgagactccgtctcaaaaaaaaaaaaaaaattagccaggtgtggtggtaggtgcctgtaatcccagctactaaaaaaaaaagagagagagagaagggaaaaaaaaaactatgtgatacaataaatatttgttgtttaagctgtgaggaattaactcaggggtaatttgttagacagcaatagatgactactacactgctatctgcatccaaccggcaggtagagaaaagagagagggcacattagaagttccctaatgggtgtggctggaagtgaggcagggctcttctcattggccagaaccactcacataaccccagtgacttgcaaggggtgctgggagatataatccccccaggggcactgtcacacaataacaaatatatatttggtctctgtccccccagtttctgggacagagctttgaaaccccttataatttccccagtgttagggatgccagcagcatcttttgttctaatatttgatctttgaccccagttcccgacaaagggctcctaaatcccttggaatttcctgagtaatgggagcatcattttttcttttttctttttattttcttcttcccttttttttttttttttttttttttttttttgtttgagacagcgtcttgctctgtcaccaggctggagtgcagtggtgcaatctccacacactgcaacctctgcctcctgggttcaagcaagtctcctgcttcagcctcccaagtagctgggactacaggtgcccgccaccatgcctggctaatttttgtatttttagtagagacgggggtttcacca[138 bp omitted]tcctgatgggggctgatcaccagcaagactcagtcaatattagaagcatggaacctgtagccccatcccactccacatctttccggaagaagagggaactggagctggaattactaatctatcctacttatgcgctgaagtctccataaaagtccctaaagtatgggggtgggagaggttccttgtagcgtccagccctacagggccttgtgggttttctcttcgtgtgtggagatgagagattgtagaaagaaagacatgaaactaagagagagtatgaaagacagctgggcccagggggccactaccaccagtgcatggagtccattagtggcctcgaatgcctggactgctgctatttattgtatacaaggcaagggggcagggtaaggagtgtgagtcatctcaaatgattaataaggtcaagcaagtcacgtgtccatgtgacagggggcctttccctttttggtagacgaagcagagagggaagacagcatacggtcagcattttttctatgtacttatcagagagatcaaagactttaatattttcactatttctgctactgctatctcccaggaacttaaaagaggaaccaggtgtacaggcggaacatgaaagtggacaaggatcatgaccactgaagcacagtaccacagggagatgtttaagcctccggatgactgtgggcaggcctggctaatgtccggcctcccacaagaggctggtgaggcagagtgttctctaactcccccaaggaaggggaaactccctttcccggtctgctaagtaacgggtgccttcccaggcactggtgctaccactagaccaaggcgtccttaagcccttatctgggcgtggcggaggactttcactcttgtcttctggtcacatctcaccatgtcccttcagctcctgactctgtatcgcctggtttttcctcagttataataataaaacagagattaatactaaaactaataattgataatatccatatataatcatctctatatcctattgctagtataacttttcttattctaagtattttctttattatattgaaacagtatgtgccttcaatctcttgcctcagcacctgggtggctctctgcccacagttccgggcggggaagcaccccaactccatggagacgcccaacctggaagctcccccaaacccatcctttgctcccgtgctcgggaggcgttcagatgttgccctttgcacctctttatctgacaggttttatttaattatatgataaactgataaatgtgttttccttagttctgtgaggcattgtagcaaatttctgagcctaaggagggagtcatgggaacccccattactagcaagtcagaagctcgggtgagaccacgtggacttgtgattggcatctcccaaggggcagcctcgtgggactgagcctttcacctgtgggatccgatgctatctccaggtagataatgtcagagttggattgaattgtgggacacccagcttgggtaggagaatttgtcagcgtgggaaaaaccccacacacctggtcacagaagtgttgagtgtgagcctgagaaaaacaggtgtttttttctagataagatccatggaaggggaacacaatttttttttttttttgagacagctctctgtcgcctaggctggagtgcagtggcgcgatctcgactcactgcaagctccgcctctcgggttcacgccattctcctgccccagcctccctcctcccgagtagcggggactacaggcgcccaccaccacgcccggctaattttttgtatttttagtagagacggg[148 bp omitted]ttgctaaatttggtttcacggggaacacatttcctggcccctgggatttgggtgtgtatcctggtctgtgacgcaggccaggggctggcatgtgacgcgaaccgggggccacttcccgaagcaggtcagcgagaggcactctggagctgttgcccagccactagtgacgtcatgggctttcagtcattcctattgggtgctcttagtgctctatcctcaaactccgcaaccggcccttggaaaagactctgaactgaggcttctggaaaaaagaatccgagcttccacgtcatttcagaaatacccccctcaccttatttatttatttatttatttatttatttatttatttatttatttatttatttattgaaacaaggtctgactctgtcgcccaggatggagggcagtggcgcgatctctgctcactgcaacctggaactcctggactcaagcgatcccccacctcagcctcccgagtatctgggattacaggtactcgctaccacgctcagctaatttttaaattttttgtagaaatggggttttgccatgttgcccaggctggtctcgagcttctgagctcaagcgatctgcccgcctcgttctcccaaagggctaggattacaggcgtgagccaccgcgcctggcccccaaattcttttatgtttataaatttaaactgtacgccgggcgtggtggctcacgcctgtaatcctagcactttgggagtccaaggcaggtggatcacctgaggtcaggagttcaagaccagctgaccaacatggtgaaaccctgtctctactaaaaaatacaaaaaattagctgggcgtggtggcacacgcctggaatcccagctactcgggaggctgaggcag[136 bp omitted]cgtcatcatcagccaagggaaaacgtggatggggcagagtccaggagacaccaggcgtgagctttcagatgtcctcccccagtggagttctagacagtgctcaattctcccggtaatgacgtgtgccaaaacgcatgcagtattgccaaccagggagtctcaccccagatcttaggatgaaaaaaaaattttttttttttttttgagtcttgctttgtcacccaggctgaaatgcagtgtcatgatttcggctcactgcagactcaacctcccaggttcaagctattctcatgcctcacgagtagctgggattacaagggtacgccatcacacctggctaattttttaatttttatttatttatgtatttatttatttttgagacgaagtcttactctgtcacccaggctggagtgcagcggcgtgatctcggctcattgcagcttccgcctcctgggttcaagtgattctcctgctccagcctcccaagtagctgcaactacaggcgcccgccactctgcctggctaatttttggtttttgttttttgttttttttgagacggagtctcgccctgttgcccaggctggagagcaatggcgcagtctcggctcactgcaacctctgcctcctgggttcaagcgattctcctgcctcagcctcctgggtagctgggattataggcacctgccaccatgccgggctactttttgtatttttagtagagatggggtttcatgatgttggccaggctgttctcaaactcttggaccttgtgatccgcctgcctcggcctcccaaagttctaggattacaggcgtgagccaccaccatgctgggcctaatttttgtatttttagtagagacggggttttgccatgttgcccaggctagtcccgaactcctgggctcaaggaatctgcccgcctcggcctctcaaagtgctgggattacattcgtgaggcaccgtgcgcagtccgggggacaaaattttaaacaagtgttggtcatgtaagcatggcagactgcacgtgtgactgacctcagatactccagctgcctcctcctgaggggtggactagaacagggactggtaaccaggggttaaaggatcgggacctgacgcctaaatcttttgaatttacatgcaaaatatgggcatataacatgagcagtggttcaggatgtgggcaatgaagagagagagcctgagttcccccacctcttactactggagtaaccaggggcaggagacttctgaatttcagtattcttatctgcacaagtggaaacgagagaaatactgtagggcagtgccttctagcgggcttagaggaagcctctggacatggtagctattacttatttgcttagtctttagcattctgcacgttttgtttgtttgtttgagatggagtctctctctgtcacccaggctagagtgcagtggtgcgatctcagctcactgctacgtccacctcccgggttcaagtgattctcatg[131 bp omitted]cctcagcctcccaaagtgctgggatttacagttgtgagccaccccgcccagccagatgttcaaattttgatatggattaaattcagttactagatcactttttttttttttttttgagacaggcccttactgtgttgcccaggctggagtgtggtggcacgaccccatggctcactgcaacctcgacctcgtgctcaagcaatcctcccacctcagccttctcagtagttgggactgcaggcaggtgccaccatacccagctaagtttttgttgttgttgttgtagagaccaggtgcatgctgttaaaactaactacccgagactgggtaatttataaagaaaagaggtttaattgactcacagttccacagggctggggagtcctcaggagacttacaatcatagcaaaaggggaaggggaagcaaggcacgtcttatatagtggcaggagggagaaagagctagaggagggaaccaccacagtttcaaaccatcagatcttgtgcgaactcactcatgactacgagaacagcatgggggaaactgcccccacgatccagttacctcccaccatgtccctccctggacccgctgagattataattcataatgagatttcagtggggacacagagccaaaccatatcagttgccaaggctgatcttaaactcctgggctccagcaatcctcctgcctcagcctcccaaaatgctgggattataggcatgagctaccgtgcccagctgcatcgtcatcttaatactattgtcttccagtctataaacttgggatgtctttccatttatgtctgttacgaatttctttctttcttttgtgtattgtcagtctttcaccattgagtaggatgtttgctgtgggtttttcataaatgcctaagccagtgtttctgttttgttttgttttcttcttttttgagatggagtctaactcaggctggagtgcagtggtgtcatcttggctcactgcaaactctgcctcctgggatcaagcgaatctctcgcctcagcctctcaaatagctgggattacagacacctgccaccaagcctggctaatttttgtgtttttagtggaggcagggtttccccatgttggccaggccggactcgaacccctgacctcaagtgatctgtctgcctcggtctcccaaaaagctgggaatacacatgtgagccaccgcgccctgcctaagccagtgtttctatttttttttttttttttttttttgagatggagtctcactctgtcgcccaggctggagtgcaatggcacaatctcggctcactgcaacctgtgcctccggggttcaagtgattctcctgcctcagcctcctgagtacctgggattactgcccaccaccacactgggccaatttttgtatttttagtaga[132 bp omitted]tcaggggagtctttccaaacactcatcccttgagatgtttgtaaacttgtataatgccctaaaaatggttttaaccactcacacatttgtt[156 bp omitted]taataaaaatacaaaaaaaaattagccaggcgtggtggcaggtgcctgtagtcccagctacttgggaggctaaggcaggagaatggcgtgaacctgggaggcggagcttgcagtgagccgagatcgtgccactgcactccagcctgggcaacggagtgagactccgcctcaaaaaaaaaaaaaaaagacatagcacttgaacattaatttcctcagcaaggccatttttatttttatttttattttttgagatggagtttcgatcttgttgcccaggctggagtgcaatggcacaatctcagctcactgcaccctcggcttccgaggttcaagcaattctcctgtctcagcctcccgagtagctgggattacaggcatgcaccaccacgcccggctaatattgtatttttagtagagacggggtttctccatgttggtcaggctggtctcaaactcctgacctcaggtgatccgcccgccttgacctcccaaagtgctgggattacaggcatgagccactgagcccggccagcaaggccatttttactttctgcagaaaaggtacactcgccagcagttttgccacaagagtacaacgaacaaaggagacagggtcatttataacctgacgcatccactctactgccgtgtcgggtttccattggctggaacgggacctcacattctgtatttgtcccaactggctagcaacttggaactttttaaaagaggcaaaggcagaggagaacaaaggaagggggaagtgacttgtggaatgctgagaaaggtaaaaacaccttcaaataaggaagaggaacaggctgtgacctaatgcttgcttggaccagtataagcatgccagggcaaatatttagggtaaattgtgggagctaaaaacataaagtacactgatttctttattacggctagcagatatttaagaatgttagcacaggtctttgaatacattttgcgtctaagagaagttactatttattcctaagtagacgaggaggaaagtctctttgaagaggaagctctactttaatttttacacattgctaactgatgaaattgtatttggagactcactctgtaaattgcctctttccttagttttccattttttatttttagtttacttatttatttattttgagacacagtgtcactctgtcacccaggctggagtgcagtggctcaatcttagctcattgcaaactctgcctcccgggttcaagggattctcctgccaggctggcttcactatgttggccaggctggtctcaaactccagacctcaagtgatcttcccgcctcggcctcggaaagtgctgggatcacaggtgtgagccactgcgcccggccttctcctcttttggcctttgactttatactcaacactgaccaccagatggtgctgcaggcacaccacagcgtggcctgacacacagcacgctgtggctgggttattacagctgagatgtatttacctggatttattattttatttatttatttatttttcagtaggaaaggtagggcccgctatttaccaggtttttttttaagtgacagagaaagactgtcttaagcacacacacacacacacacacacacacacacacacacacacacacagagcttataaaacagtttaacggccgggcgcagtggctcatggcttaatcccagcattttaggaggctg[134 bp omitted]gaagcaggagaattgcttgaacctgggaggcggaggttgcagtgagccgagatcacgccattgcactctagcctgggcggcagagcgagactccatctcaaaaaaaaaaaaaaaaaaaaacagttaaaaaaaaaaaacagtttttaggccccattatgcctgtgtgattctttgtgtcctaatcttgggcgcacacacacacacacacacacacttatttatttttcttgagacagagtattgttctgttgcctaggctggagtgcagcgttgtgatctcagctcactgcagcctccacctcccaggttcaagtgattctcctgcctcagcctccagagtagctgagattacaggtgcccgccaccacacccggctaatttttctatttttagtagagacaggggtctcgccatgttcaccaggctggtctcaaactcctggcctcaggtgatccacccacctcggcctcccaaaatgctgggattactggcgtgagccacggcgcctagtcctgtttgttattttaaaatgaagacatccttaagcatgaaaatgtctttaaatattttgaaaaatgttttctaaagccatgaaggcctatagtaccctaagtcttatataattaaattataattaaagatttaatctggctgggcctggtggctcacacctgtaatcccagcactttaagaggc[216 bp omitted]agagcgagactccatctcaaaaaaaaaaaaaaaattattctttgcagatattcattttctcacagaattggactcttttttttctttttctttctttctttctttcttttttttttttttttttgagacagggtcttgctctgttacccaggctggagtgcagcggcatgaacacagctcactgcaacctggaattcttggcctaaacccatcctcctatctcagcctaccgaatagctgggaccataggcacacgccaccacatgcagctaatttttttattttttgtagaggagggggggtctcactatgttgcccagggtggtctcgaactcctgggctcaagtaatcctcctgccttggcctcccagaatgctgggattacaggcatgaggcaccaacacaaagttattttccaaagtgagctgcagcgccaacactcacacctactcactgtgtgcccagcactgctcatggatagcagttcttgaaccctttggtcccaagaccccttcacattctcaaaaatcactgaggctgagcacggtggctcacgcctgtaatcccagcacgttgggaggctgaggcgggcggatcacctgaggtcaggagttccagaccagcctggccaacatggtgaaaccccatctctactaaaaataccaaaaaaaaggccgggcgcggtgactcacgcctgtaatcccagcacgtcgggaggccgaggcgggtggatcacaaggtcaggagatcgagaccatcctggctaacacggtgaaaccccgtctctactaagaatacaaaaaatttagctgggcgtggtggcgggcgcctgtagtcccaggtactcgggaggctgaggcaggaagaatggcgtgaaccctggaggcggagcttgcagtgagccgagatggcgccactgcactgcagcctgggtgacagagtgagactgcatctcaaaaaaaaaaaaaaaaagaaattagccgggcttggtggcgggcacctgtaatcccagctactcgagaggctgaggcaaaagaatcgcttgaacccaggaggcagagattgcagtgagctaagattgcgccactgcactctggcctgggtgacagactgagactccatctcaaaaatcatcatcatcatcataataaattgatggccaggcacggtggctcacgcctataatcccagcactttgggaggccgaggcaggtggatcgtgaggtcaagcgatagagaccatcctggccaacatggtaaaaccccttctctactaaaataacaaaaaaaaaaaaattagctgagtgtgatgacacacaactgtagtcctagctactcgggaggctgagacaggacaattgcttgaacccaggaggcagaggttgcagtgagccaagatcatgcctctgcactccagcttggtgacagagcaagactcggtcttaataataataataataattgattacattgtacctgctctagaaaagaaaaaagaaaaaaaaatcattgatgatagtctcttaggctgggggtggtggctcgtgcctgtaacctcaacactgggagaccaaggtggaaggatcgtttgagatcagcctagtgggaccttgtctctacaaaaaataaaaaataataaaattaggctcagtgcagtggctcatgactgtaatcccagcactttgggaggataagatgggcggatcacttgagcgtaggagtttgagaccagcctgggcattatattgagaccttgtctctacaaaaataaaaataaaaaattaggcaggcatagtggcacatgcctgtgattccagctgcttgggaggctgaggtgagagaattgtttgagtctgggaggtcgaggctgcagtgattactgcagtacactgaatgcgtcactgtactccagcctatagatatacatgtgtgtatatatatatgtaggggtgacgcttgtgaattcttttttaattttattatttttattttctttttgagatagagtcttgctctgtcacactggctggagtgcagtggcacgatctcatctcattacaacctctgcctcctgggttcaagtggttctcctgcctcagccttccaagtagctgggattacaggcatgcgccatgatgcctggcgattttctgtatttttatttcatttatgtatttatttagagatggagttttgctcttgttgcccaggctggagtgcaatggcgtgatctcggctcactgcaacctctgcctcccggattcaaacaattctcctgtcttagactcccgagtagctgggattacaggcatgcgccaccacgcccggataatttttgtatttttagtagaga[134 bp omitted]tggccaagctggtctggaacccctgacctcaggtgacgagcctgccttggcctcccaaagtgctaggattacaggcatgagccaccaagcccagccttaattttattttaagttctggggtacatgtgcaggacatgcaggtttgttacatgggtaaacgtgtgccatggtggtttgctgcacctgttaacccatcacctggtattaagccccgcatccattagctatttatcctgatgctttccctccccaccaccctgcaacaggccccagtgtatgttgttcccctccccgtgtccttgtgttctcattgttcagctcccacttataaatgagaacatgcggtgtttggttggttttctttttttctttttttttttttttagatggagtctcgctctgtcacccaggctggagtgcagtggcacgatctcggctcactgcaagctccacctctcaggttcacaccattctcctgcctcagcctcccgagtagctgggactacaggcgcccaccaccatgcccggttaatttttttttttgtatttttagtagagacagggtttcaccatggtagccaggatggtcttgatctcctgacctcgtgatccacctgcctcagcctcccaaagtgctgggagtacaggtgtgagccaccgcgcccggcttctttatttttttgagagagggtctcactctgtcacccaggctggagtgtagtggtgtgatcttggctcactgcaacctccatttcccagattcaagcaattcttgtgcctcagcctcccgagtaactgagagtacaggtgtgtgccaccatgcctggctcattttcatatttttagtagaaatggggtttcaccatgttggccaggctggtctcgaactccagacctcaagtgatctgcccacctcggcctccgaaagtgctgggattataggcgtgagccactgtgctcagaccggtgtttggttttctgttcctgtgttagtttgctgaggacaaaaaaatatggaatgctttgcgaatttgtgtgtcatcctcgcacaggggccatcctagtcttctctgtatcattccaattttagtatatgtgctgccgaagtgagcacatggattgttttatcaagggaagaaagcttcccagaggcctccaggcaagtttcccttaggatccccttggcctctaacctttccttgagggatcattgacaatgggaaatgagaggatgtggtaatgggtctgctgacgccgtaaaaaactggactttcagtgtcaacgccgatggctgctggataggccacagatcatgtttgccagaatagtcccacagggtgtccctccagcaaattggatcaaggagattaagcaccacacctgaggtcacacagccagccgataaccaaggcagtctgtgaattcgaatctgcaagaggatgtgcctcgtccatccgaatgcctggctttctctacacctccacataacaattataatatgaaaaggtatatgtgggccaggttgggtagctcatgcctatcatcccagcatgttgagaggccgaggcaggtggatcacctgaggtcagcagtttgagaccagcctggccaacatggcaaaactcccatctttactaaaaatacaaaaattagctgggcatggtagtgcacgcctgtagtcccagctactggggaggctgaggcaggacaatcgcttgaacccaggaggcagaggttgcagtgagtcgagatcatgccactgcactccagcctgagcgacagagcgagactctgtctcaagaaaaaaataaaataaagtgtgtgtgtgtgtctgtgtgtgtgtgtgtgtgtgtgtgtgtgtgttggagtgcagtggcatgatctctgctcactgcaacctctgcctcctaggttcaagcgattctcctgcctcagcctctcaagtagatgggattacaggcaccctccaccacgtccagctggtttttttgtatttttagtagagatggggtttcaccatgttggccaggctgctcttgaactcctgacttcaggtgatccgcccaccttggcctcccaaagtgctgggattacgggcatgagccacagtgcctggcctttttttcaagacagtcttgctctgtcacccaggctggagtgtagtggcacaatcacagctcactgcagcctcaacctcccgggctcaggcaatcctcccacctcagcctctggagtagctgggactatactcacatgccacctcacctggttaattttctgtattttctgtacagatgggatctcactgtgttgcccagcctggtctcaagcaatcctcccgcctcagcctcccacagtgctggaattgcaggtgggagtcaccatacccagtctaaactcttccacgtttaatccctccagcaggtgagagtatcgtgcctcactccacacccactagggtcccgtgactacagtcctggctgagggcactgggccacgtctgggtgtagaaaagaccctttgggccaggtagcagactgcaggctggaacaagggtgccagtagaagacagcagctgagctgaggccagggcctaggggacaaagaggcgggggaacggacagcagagtcgggggcaggaggaacagggatcggggcctcgtgggctttgagagaaaaggatgcagcacctaggggtccggcctagagactgggagacgggaaagtaggggaggagctggttggtggggggcagatagtaagttcagtgccggagacatgaaatgctcccccaggttggagaaaccatcagaacactgggggctcggatgactgagtccttcagaataaaatgggctgaggaagcaggattcctgggttaaagccccagagtcacgtcactgaagaagcccgacaatgtgtgttctttggcattttatttcaaaattgcagcaaagacagagaaaaaaaaatcaacggcagcaccaggggtctggcctgagaacggagagatccggaatcggggccaaggtgtatccttgaccgcacgacaaggagtaatgggcggacctgaacccgcgacgaggggctgggggccaagatgcctgggtcggcccttacggctttgggagtgtcgcaaccacatgggggcgccagagacccagacgccgcccgctggccttttatttcgtattgcacttcaggtgagtcattggtagggaggcgagtgctggcgtgacgagatgctacgggtcggtggatctggagcacagcctgcagcttcacaccgggaacatccactcgtgggctctgattccgtactgcggaacaacggaggcagtgcgtgaggtggaagctgcactacaactcccagtaggccctggggtgttccaggccgagtgcctacggagctgtgccccagcggctcacgggaaatgtagtccacttcccagagggccccaacaatgatgggaacggggaatcaaggctaaggcggcgcagaggcttccgggagatgtagttctgaagacaggaattatggccaggcctctaaggctcttggaaaaagtcactttcagctcagaaagcccagatagtcagaggatgtgtagttctaggtcctgatgcacaaaagtttacagaaatgtagctctaggtctgggaaaggagcccagagattcttgggaaagagatcttggcccagaagatgggaatacccccagagatttatgggattaaacagtctggtgccagagaggggccaaggtccagaggctcatgggaggaagctttctccggccaaagggatagcccagggctccagggaatcttgggaggccaacctctgagatggccagagggctggctaaggtctcagtgattcatggaaagggcctttctcccaccagggcacccggggcagcagaggatcacagggagggagtttctcccaccagggcacccaggggcctcagaggcccacggagagggggtttctcctaccagggcacccaggagccgcagaggatcacaggaaggggtttccaaagctgaagacatatccagggctccgggagctcccaggaaagggtgatttagccccaaggggttttccaggccacagagcagcacagaaagcccactctccagggcctcaataagaaaggccattatctgttcctggtactactgaaggaggctggctgttagtccaggggctcatgggacaccaacttctccagggaacaagctcccagcccattccccagctccctgcagctcacctggatctccttcagctccttctggaagcggaggatcagctcaggcccattttccatggtgggaatgtggaggttctgggacagaaggtgcggtgaggaccaagcccctcccctccttccctcccacccacaatggcagccccgcctcaccctgtctttgtacaggattcggtgcactgggcagacctggcaagcggtgcccgagccaaagacttcccgcacgcggccctcctccagggcccgcagcaactgcttcatggtgatcgtgcgctccaccacccggaactcaccctgcagggcagttggcagagacacgtgtccccagagggttgccctgctgcagacctccacctctccctccctgaggatagtgagaaagacagaggcccaacgggagagacagacccaggagaaggggcagagacatgccagtgtgccccagtcccagccctctgatgccctggcccctggcacatggcgcccatcaccagaagatgccatgtcctcacccaggtctgagccatgtccagtagactctgtctgaccactccaggcaggataacaccattcagcgggggcgtcaccagctccagcactagggcaggtgtaaggggtggaagatgttacctctcaccccctagcaccgccgtcttaagagccacccccttcccccatcccagaatccctggggcctgtaacctgccaggaatgatggtgccacccacttccaccagggttcgggctgggtcatgggtgggcttacccccatcttcgtgggtccagtagacaaagatgttcatggttcccacctcggtgagctggtggtcgggcccatacagccagaggacctgttcacagccccgcttgagtgcctcctgttgcactaacacggtgggcccataattcctggtggagggcagtctggttgggtggggcaagggagccccatccttccccagcccagccccagaggaggctcatcctactctctcccgtctccctgctcacagctctcacagggctccccagttcccctgagatggaatccttgacttttcatttggcatcaggaccctaaatggttatgtcccctctctcctgtctcttcccacttttctttcttttcttttcttttttttttaagacggagtctcgctctgtcacccaggctggagtgcagtggtgcgatcttggctcactgcaacctccgcctcccaggttca[139 bp omitted]aaccatttctttttttctttttttcttttttttttttttgagacagagtcttgctctgtcgcccaggctgaggctagagtgcagtggtgcgatctcagctcactgcaacctccgcctctcgggtccaagcgattctcgtgcctcagcctcctgagtaactggagtaactggggcatgcagcaccatgtccggctaatttatattcacatttatatttatatgcccgcctcagccccccaaagtgctgggattacaagagtgagccacagcgcccggccttactttttatatttttagtagagacggggtttcaccatgttggccaggctggtctcaaactcctgacctcaagtgatccgcctacctcggcctcccaaagtgctgggattacaagcgtgagctaccgcgcctggctccaaaaccgtttctgttgtcacctcctcgagaggtgtttccagacctccaggctgggtgctggaccttccctggactcccccagtgaactgggctacctggatgactttctgagtctctctcccagagatagcctctcccctcagctgctaacaagcctcccatggctccccagtgccccaggacaagaccctagcctccttccggcattccaggcctgcctgggtctaatgaatacttgctaagcatttttcaaaacccaaacttatttttgtaacctgaacatcttctgtgatcctattccttctgtccctgtacacatggttcccaggactggaaacagtttgctgacttttgtacccaggaaaccccctcctccctcctcgtcagacctagttga[139 bp omitted]gcctcctgagtagctgcgactacaggcgcccgccaccaagcccggctaatttt[182 bp omitted]aacatgcagctccgaatactggggctcccaccagcctgggagacccaggagagcagggctcggggctgactcatctgtgtccccagcttctgccagcacagggcctggccctcaggagacctcacaggatgtggctgaaaggacctgaatgcacccccagctggggccacattcctgtcccaacacgccagtgcccaccctctgccttggttgcccaggagacccagctgtctccttcctgccctgctgagctgaggccactgggagacagatttacacagaaagtccacacgggggtgaggggctttggaggctcaaacgactgtgggagctgggtatggggagcgcagcccagcctgggggatcaggggaggcttctggggcgagaagccaatgagctgagtgtaagcttcactcctggaggcttccagggaccagtcctggtttccccactgacctccacccaatgccttcccatctgtgagcctttttgtccatctgaaaaataatcccctcctccttccttccatggtttgttttcagggaccagggaggtcacttagcactgagccctgcacggtgctgatgatgtcaccttcatgtgacatccagaggcatggccgaaagcacgcacgctggtccctgtgtctccaacgcccagtgcgccagtcgttctggggatgggggtgctacttacccacctaacttgtagttgccgaccccgcccacccaggcccggatgaaggctgggtcggccaggagggagaccggggtcacggagcctccagggaagtaggcacccactgggcagagaatgacgaacaggagcgcgcgcgtgggctggctgacacccagcgagggctgcgacgggcaaagggacagcgtcaggagtccaggcccccagtcccttcccgtccccaggcccaggcctccaggaccccacccctgccctgcagaatccaacccccgcagcccagcttcccagccctggagttgggcccacctcgttcccaatgagcacaggccgcacatagaggctggtgccggcggcatcggggacccagtccttgtccacttcgatgagccggcggatgcactccagcaactccagcttgtcgaaactctgggtgggattctgaatgagtcaaggggcccttgctgccccggccccagccctcctccccaccccggtggaccgggacccctcaccggcaggcacaggcgcatggctgagcgcagcatccggtccatgttgagccaggggcggaagaggcgcacctgctggtctttgcctttgaacgccttcatgccctcaaacagctgcggggacacgcgggtggggaggctcagagacttctccagacagtcatgagagacaccaagacagacagagacagatacacaaagacacagacaactgaaagatggaggccaagaggagagcaccggggagatttagcagctgggtcagagagatggagaaaaagagagacagatatagacagggagacaaacaggtagag[131 bp omitted]aagaccccatctctaccaaaaaatacgaaaattagccagacgtggtagcacgtgactggagtcccaggtatttggaaggtggtgggaggatcacttgagcctgggagtttgagactgcagtgagccacgatcatgccactgcactccagcctgggacctagttttttttttctggagactctgtccctgatcactgccccatggttccaagtttgcttgttcagcatctgctccactgcagagtggaagagcctggaaggcagggattacccttgacacgtttaccagacagcctctcctgcagtcccatgcaccagggtaggcagcgcttggcacagagtgtttttttgttttgttttgttttgttttgttttgagacagggtctcactctgtcacccaggctggagtgcagtggcgtgatctctgctgattgcaacctccgcctcccaggtccaagtgattcttgtgcctcggcctcctgggtagctgggattacaggcgcccaccaccacgcccagctaatttttgtatttttagttgatccacccgcctcagcctcccaaagtgctaggattacaggggtgagccactgcacccagccagactttttttttttttcccatagtgggtttttgatgaatgaatagataaatgaatggaagacaagcaaaactagctacaatattttggggggataaaaaccaccaccacaaaaatgaggggcaagatggggcaggggcagggagtagccatatcaggtagtaaaacattataaatctacaatacttaaaacagagtgacactgctatatgagtggacagactgaataatggaatagataaccaaatatccatctagagaaaaactacgttgaatctctatttcacacctcacaccagaaaaaattccaggtgcattaaaagtctaaacaaaatatatatatatatattacaccataaaagctatagaaggaaacaaaaataactgttttatatcttggattgggaattttattttttattttatttgagatggagtctcactctgttgcccaggctgaagtgctctatcttggctcactgcaacctctacctcccaggttcaagcaattcttttgcctcaacctcccaagtagctgggattacaggtgcctacaaccacgcccggctaatttttgtgtttttggtagagacggggtttca[142 bp omitted]ctatgttgcccaggctggtcttgaactcctgagctcaagcaatccccctgcctcttcttcccagccccagatgaattttttaaaacctaacctgatagaaaaatcagcctagcaaatggacagttcacacaaaaggaaatacaggtggcccttaagctcgtgagaagatagtcaatttcattaatcactagggagaaaaatgcaaattaaaattagtttgagatacctttaaaaccacatgggagattggaaaagatctaaaacttggacaagggttgtccaaggtatggaaacaggctctgctggtgggtgtggaaactgacacaccctgtagatgtagatgtggcgatacgtatcaagattacaagcatacatatcctttgacctacagttcccgaaattgagcctctagatacatttgcacttaaacaagtgactaaagaagggacgtgtgtactggattccttttttttttttttttttttttttgagatggagtctcactctgccacccaggctggagtgcagtggcgcaatctcggctcactgcaacctccgcctcccgggttcaagcaattctcctgcctcagcctcccgagtacctgggattacaggcacccgccaccacacccagctaatttttgtatatttagtagagatggggtttcaccatgttggcaaagctggtcttgaactcctgacctcaggtgacccacctgcctcagcctcccaaagtgctgggattgcaggtgagccatcacagccggccctgtactagattctttattgcaaaattgtttataatagactggaaacaacctaagtgtccaacagtaggggattgcctaaggaggtgcattgttaggatgatacagcatgaggctgcaagaaagatggaaaaagctctttaagctttaaggtatagagaagaatttccaggcccagtatgatggctcatacctgtaaccccagaactgggaggctaaggtgggagaattgcttgaagccaggagttcgagaccagcctgggcaacaaagtgagatcctgtctttgcacaagatttaaaaattaactgggcaaggtggtgtgtgcctgtagtcctagccactcgggaggcagaggcaggaggatcacttgagcctaggaggcggaggttgcagtgagctgagaccatgccactgcactccagcctgggaaacagagcaagacaccgtctcaaaaacaaaacaaaacaaaacccaggtaaaagagcccggatacaccggatatagtggctcatgcctgcaatcccaggactttgggaggctgaggcaggaggatcacttgagcttagaaatctgagatcaccctgggcaacataacaagaccccatccctaaaaaaaaataaaataaaataaaaattagctgggcatggtggtgcacacctgcagtcccagctacttggaaggctgacgcaggtggatcgctggagcctgggaggtcaaggctgcagtgagccaagatcgtgccactgcactccagcctgggctacagagcaagaccctttctcaaa[135 bp omitted]ggtgaaaccccatccctattatttaaagataataaataaacaaatacaggtagacaaagacagaaagcagactaatggttgtcatgggctggggtgagggacaatgggtactgattaataggtatgggggattaaacagttctgaaccttgatggtgctgatggttgcataacattgcctgccactgaattatgggctttaaaatggttggaggctgggcgccgtggctcacgccagtaatcccagccctttgggaggatgaggcggtggatcatctgaggtcgggagtttgagaccagcctggccaacgtggtgaaaccgtgtctctactaaatatacaaaaattagccaatagtggtgcatgtctataatcccagctactcaggaggctgaggcaggagaatcacttgaacctgggaggcagaggttgcagtgagccaagattgtgccactgcactccagcctgggcaacaagagtgaaactctatctcataaataaataaacaaacaaacaaacaaataaaatggttggaatcccacatttgatgctgtgtgttattatgtatgcgtattagtaccacaataataaaaaataaggccaggcatggtggctcacgcctgcaatcccagcactttgggaggctgaggtgggcagatcacttgaggccaggagttcgaaaacagcctggccaacatggtgaaaccctggctttactaaaaatacaaaaattagccgggtgtggtggcgggcgcctgtaatcccagctactggggaggctgaggcaggagaatcacttgaacccgggaggcggaggttgcagtgagcgagattgtatcattgcactccaacctgggggacagagtgagactctgtctctaaataaataaataagaaaaaataaaataaaaaataatacacgtggtcggcctgcaatccacacatgccctggagtgtgggtgacatagggacagcattgtcctactccctcatcctcccccttccgccccctggacccgcgggatcacagcagtgcgttctgtctgccagggccacaggcttcctctgctctcactcagctgaagaaaaagtactgggtccccagccagaggacaactgctgtgctgggctgaagggagaagtgtgtggtggtctccaagtaaccagcttcctgggggctcagcaggcggaatcctgcccatcacgcttatgtactggcaggagtgtctggctgtgattggaggtgtgtgtgctctgtacagaatcgactggtgttgcttagatgtccagagtgggaggggagaggggaaaaaacaaaaccttaaaattctggaaaggaaggaagaaaggaaaaaacagagggagggagggaaaggaaagaaaggaatggaataaaagtcttcatgccacagaactgtgccctggaggactaaaatcagccaacctgctaaccagttactggagctgtaagatgctcacttaaatcttgtctcaaccaaagtttccttctgaagaccttgctttcagccgcagctataagtcctaaaaccaaatgcctcctggatctgtctcctagaaacttcacagtatctcaggctcaccaggtgccacaaagccgctcctcctcctgggtccccatgtggggacaggcccaaggtctacctggtcaccagcccggcttcctagcctgcaactcttgccctccacatggcctgagagggctcttactatacccagacatggccctgcccctcccttcctcagagccctcagtggctcccagcacccttggacaaggccccagcccctcagctcctccatggccctgacattttcagcctccttaaccatgctccaacaccgcaatttctcccaaatgtaccaggctctactcccgtttggggtttggattggctgtctccactcctgccatcccccaccgactgtcccccttcccgccatctccaactgtcccctctcccgccatcccccctgggctgtctcctctcctgccatccctcccccggctggccctctcccaccatcacttccccggctgtccctctcccgccatccctcccccggctgtccctctcctgccatccctcccccggctgtccgtctcccgccatccctcccccggctgtccgtctcccgccatccctcccctggctgtcccctctcccaccatgcctcccctggctgtcccctctcccgccatccctcccctggctgtcccctctcccgccatccctcccctggctgtcccctctcccgccatccctcccctggctgtcccctctcccgccatccctcccctgactgtcccctctcccgccatccctcccctggctgtcccctctccagccatccccctggctgtgccctcccccaccatctccccccccaatggctgtcccctctcccgcgatcatcctggctgtccctctcccgccagccccccggctgtcccctttcctaccatcaccctgtcacctctcccaccatccccctctaagcttccctctatgccagaagaagccatgctttctttcaagtgaggctgggggtctctactggcctccacagggcctccatcagagcacagatcatactgagttatgcccacagcatggggttttccaagtgaaggaaccgggtctgctcatctcggggaacccagcatcaccaagcatgagcctggagcatggaaggcctcagaaaacaaatggtgaatgcacagaaaggagaaacacacaacaaacaaaccaagagaggtacacctggcaagagacacagcaaggaggaggagatgcagacagggacagggagagaggccggccgccatgccacctgcagggagtagtggaggctggaggaggctgggtgcagcgtgaggttctggaagggctggattcggggctggccccagcccttgtcattccattccaccatcagcatgtggtcggtaaatgtcttcccaaacaccaggggctcgccggggccaggcttcttatgaggcttctgtgtcatttccagctgcaggtctgcagcctgaggaaagacaggggtatcctagaatctggccacaacctcccagctgaaaaactacaactcccatgaagccctgggcctcagacccatagagaagaaggacctgtcaccctggaggattctgggacatgcagtttcatcccttgtctgcggcccaatggcaggctgttaagctaccaccactcactgccatctctgggctgtggaccttttggagatgcccaaaaccagctgccagccccctcctctctcagagccaagcatcgagttccctcctttcaccttgaaactggaggaggcatatcttctgggaccacacagaagccaagggacagagagaagctttcgtgcccagatctgggtggagaaagaagtgagagagggggtgagtggggcacagcaggggccctggcagctcgctcgccacctcctgcacttggaggtcccactggcctgcctgttctgtcccagtttcagtccattctagacggggcaggtggtcctgaaggaggccaagtcccctccctgccctgacgagggctcgctggaaagagctgagtcagctcccgccccctcctccatgctgcggcaaagtcaaacgcaagcgcctcccaccccagagacctttggtcgcagcctggagatcagctcagacaagaaaacaaccagggaaggcacacaggtaagtgaaggcctccgggtacccaagtgctgacaggccttagaagaccaaggaccgacaggtcctgctcccccagagctcaggggtgcagaccccaggcccgcctccctcagacctaagtaagagtccagactctagctgcctcctccctcagacccgaagtctgggcccccagcccctcctccctcagaccctggagtccaggcctcagaccctcctcccttacatccaggagtacaggccccacccctcctccctcagacccaggagtccagttccccagcccctcctccgccagacccaggagtacaggtgcttattctctgaaggtattcgatcaactgggctctgattacctgaaatacaaacccattttggcagtgactccaattcccttcagcccctggggctgaggggcagctacaggggcctggggagccactgcagtcctcactgcatgaggctcaggcgggtcctcccagaggggagtaggaagagcaggtctggctgtgtccagcaggctgggccctctctggtgacctttgacctcacaaggcctctttccccagccctgtggggaggcgttggggcgtgaggttgagagagacagagtggcctggcctggcctgccctgtgagctgggtgagttggcactgattctggaagatggacgtgaatgggcgtggtcacttgtcgctaggtgagttgctgggagatgggcctgcagcgtggtcttgctggtgtgaggctccagggattccggggtgatcagagcgtgggtccccagattgcctttgggtggcgacatctagactgctcagccttgcagccatgcttctgcccagagggataggacacccacagtatgagagacacaaacacagtgcgacagccagcctgtgggcaggagagctgccctcagagccaagatgaaaaaaagagagtaagagatggaagaggaaggatgagaaaaagaaacacagaaaggggcgcacaaacagaaaaaaaaaaaaacaaaaacagaaattgacgccaagaaacaagagatgccaaaatagatctaatcatagaaagaggccacacgcagtggctcgcgcctgtaatcccagcactgtgggaggccgaggcaggaggatagcttgaggccaggtgttcaagaccagcctgggcaacatagggagaccctgtctctacagaaaatacaagttagctgggtgtggtggcgggcgcctgtagtcccagcaacttgggaagctgaggcaggagaattgcttaaacccaggaggcggaggttgcagtgagccgagatggtgccactgcactccagcctgggcgacagagcaagactctctgtctcaattaaaaagaaaaaaaacaaagaaagaaagtaggcagctggctcagtagctcatgcctgtaatcacagcactttaggagacagaggtgggaggactgcatgaggccaggagttcaagatcagcctgggcaatatagcaagaccctgtctctacaaacaatttaaaaattagccaggtatggtggcacacacctgtaattccagttactcagaaggctaaggtgggaggatcaccttgacctactggtcaaggctgtggtgagctacgatcacactgctacactccagcatgagtgatagagtgtctctcaaaaaaaaaaaaaaaaaaaaaaaaaaaaaagaccagcatggtggctcatgcctgtaatctgaggcaggtggatcgcttgagcccatctactcgggaggctgaggcaccacagtcacttgaacccatgaggcggaggttacagtgagccgagatcgtgccacggcactccagcctgagcaacagagcaagactcggtcaaaaagaaaagacgagacaaagaaataaagtacgtttgggggttcacagggcaggtctctataatgtgatagaacctccattatgtcccatacagcccaggagtatcaccatcaaagaccaggagtgtcactgtcaaagcccagcagtgccctccatactccaggactgtccccatatcacggccccggagagaccccatcataccgcagtctgcccttgtcacagcccacacatgaccccatcacgtctagaactgccccctttatagcccaggactctcccccatcacagaccagggctgttctatgatggcccaagatgctccacatcacaagtccagattgtgcctgtaacttatcagaactggtccccagcagagccaagtactgtcccaaacagctcaggaatgtcccctatccaaagcccagcacttttccccattataaccagcattgtctctgccaaatatcagggcttatttcctattcaccaggtctgaaattaaaaaaaaaaaaaaaatcccattgttgtctttttcaatccccaggactatccctatgttgctgtctaggccagtaccttccagactgtccctaccatggtccagcactgtcctctccacaccccgggactgtccccatcacagctgaggactcagcccaattatctccattacaggatatctctatcttcatcagagcctaggaatgtcccatcatgagttcagggccattctatgacaccagaactgtgccatgatgagacggtccacatcagtcccaagtggacctgtcaaagcccagtactgccccaccacagtccaggagtgtcaccactaaagcccagattgcccacataccccaggtatcccaggactatccctatcagtcactaagagccgaaaaaagtgaaattctgccctgacattcatcagctaggataagagactcaaataaagtcaggtgtaaagttaacagacagttctcccaaggttacaccgcagctgtgaaggcttgtaatgacccctttctttggctgtttccttcctcactgagaaaccttgttctctgaaatcatagactctgggaaacgctgctgctgtttgacatcgcacagtcagaagggatcgtctcagccagcctgcagcatctgtcactttgaccatgagacgctgcctcgatttccaatccaggtgcaaagcttcagataggagtttgggaagcacagcaatccccatctcttatttttttcaactttcattccaagaaaataggaccttgagtccaattcccagagctgagacttgaggtccaactctgccttcacctgcacccggccctggaggtctgggcccctttattccagctcccgcacaggctgatgccccaccgcaccccagggctccgctccccaaatcacaacctccccacccccacgcctccctcattacagggtcctccaccatgtttccctttttttttttttttttacctccccgccaattacttgccccacctcatccgcgtctacctgctccccctcaccccattaaagcctcgtgctcctttccaaagggcgccatcctcctccgcgccctgcagcggaaccccagggcgggaggagcggcgccgagtcggaccggctgcaggccagtggtcttcccggaagtgcgcctcccccggttatttcccagaccccggcgcggggctgcgaacccacctgccccagagcggctgcggccatgatccgtgcggcgcgtaactgtgcccgcccggggcgcggctccgaagagagacgttccggccacgccccgctcacgcctccttctgggggaaggcggccgaccagcgccccaggccgtcccagctccagggcgtcggcagggagccggacactgctgcggggcgcaggcgctggtgggagggcaggacttgaaatacggtccctgccaggcgaagtggctcaggtctgtaatcttagcactttgggaggccgaagc[132 bp omitted]gaggcaggagaattgcttgaatcggggaggcagaggttgcagtgagccgagatgatgccactgcactccagcctgggcgacagagtgagactccgtctcaaaaaaaaaaaaaaaaaaaagtcctggcttggtggctcacacctgtaatcccagcactttgggggccaaggcgggtggatcacctgaggccaggagttcaagaccagcctggccgacatgggga[134 bp omitted]aaaccccgtctctactaaagatacaaaaattagccgggtgtggtggtgtgcgcctgtaatcccagctactagggaggctgaggcaggagaatcatttgaaccctggaggcggacgttgcggtgagccgagatcgcgccactgcatttccagcctgggtgacagggtgagactccgtctcaaaataaataaataaataaaaataaatacataaaaatacaaaaattagtcgagcgtggtgccgggggcctgtaatcccagctattcgggaggctgaggcaggagaatcgcttgaacccgggaggcggaggttgcagtgagccgacattgcaccacagcactccagcctgggcgacagagtgagactccgtctcaaattaaaaaaaaaaaaaaaaaatcgtatccctcggccatcgtgtctcggcaatcctaccctgggacactctgtctccaaattctacccccacagtgcccccaagtcctgtccccgggtcactatcctgccacccctaacagccacaggcccaaacagccaaaccgcgggacccttccctcacagggcgtcgccctgtttttctgcgctccgccccagtcctcctgccccacccgccagccccgggctgtagggtcggggcccactgacagctcccgcccccgccgcggccaatcagcggttggtgcacacgcccccccggccacagccaatccgcagcagccctgcagctccacccctcacctgggggacgccagcgcacccgggccctgccccccccctgggtccagctggggagtctgcgtcccccagtgccctgcggaccaaaacccaggagtttcagcccctcctccctctgatccagatgtctcaaccccctactttctcttccctttggacttttcttgccagccaccttcctattctacaggcagtgagaggaaaactccttttccctgagggccaagagtaagagggccttctgcgtctccccctccattacctcctaattagcgcttaatttactctcccctgcgggcctttagttagcgcgctggtgaagccaaaccgctctacccttcccaggagcccctggcgacagcgacagggctagcaacatcaggcacctgcttgctgcaaggcctggggttggggggcggggggagctgcagtccttcagggtcgaggcaacttgtgggtctggggtgcaagggctaagtggggcagaaggactcgtctaaaggatgggaaataaatataacgatatcctcctccttctggctgcaaatcgtttttatgggaacctgcagggtgacccggcaccttgctaactgggcttagagtctaagggcttgggggctgcatctgatacaggttggagtttggggtgggagagtcctaggaagggggccccaagtagaaatgagagaaatcaggaagggatatcgggggcgtccacgggggtgctccgactggccttgcacccgtaccccagctctgcaccccccgtcacgagcagttcaatgcccgtgcagaagttggcttcggaggccaggaacactgccgcagccccgacctcagcgggctggcccatgcggcccagtggctggggagaaaagaggggggaaggaggtcaagaggagccccacttgatcgccatgccccccacccccatgccaccttctaccacctggatctgaaccccacttctacctgggccagcatgccctctcggattgtggccctagggtctggcattaaggctgccagctcctcccacagcggggtccagatgtttcctggggagatactagaggaagggagaggggggatcaaagcaatctgtctcgaaccacttgggatcactcccagtcaccccagtccccccaggaggctctccgcctgctcagagcagctcaccagttgactcggacaccatatggactttcatccagggccaaagctttggtcatggctgttactgccccctgcaggaaatggagcggggaagaaagttcagtccccgggacatggggtccctgccatccattgtctcctgccagccaggggggcatcagaatggggaagtcatgccctccttgaaggctgccttcagaggcaccaggcttggtttcttgggagaaacttggcatagaaatctgtcacaggaaggccaggtgcagtggctcacacctgtaatcccagcactttgggaggccgggatgggtggatcacttgggccaggagttcgagaccagcctggccaacatggcaaaaccccatctctgctaaaaatacaaaaattaaccggacatggtggtgcacgcctgtaatcccagctactggggaggctgaggcgtgagaatcgcttgaacccatgaggcaggggttgcagtgagctgagatcatgccaccacactgcaacctgggtgacagagtgagaccctatctaaaaaaaaaaagaa[132 bp omitted]tgaaatctcgtctctactaaaaaatacaaaaatctagctgggcgtggtgacagccacctgtaatctcagctacttgggaggctgaggcaggagaatcacttgaacccgggaggcggaggttgcagtgagccaagatcacaccattgcactccaacctgggcaataagagcgaaactccatctcaaaaaaaaagaaagaaagaaaagaaaaaacagaaatctgctgggtgcggtggctcatgcctgtaatcccagcactttgggaggccaaggcaggcagatcatgaagtcagaagatcgagaccatcctggctaacatggtgaaaccccgtctctactaaaaaatacaaaaaaaattagctgggtgcggtggcatgcgcctgtagtcccagctactcgggaggctgagtcaggagaatcccttgaacccaggaggcagaggttgcagctgagattgcaccactgaactccagcctggtgacagagcgagactccatctttaaaaaaaaaaaaagaaaagaaaagaaaaaacagaaatctgtcacaggcagttatgcctgggtgctgcatctgggagttaggtgtgagactttctagggccaagatcttgctaggtctggctcctaagttgtctggactcaaagccaaggcccatgggaaggagtagggagggaaggaaggggtaggggctgccataccttggtggccacatagggaactgcctgggcctggccgattgcccccaccaggctggagatgttgatgacattcccttgactcttccgcaggtaggggagggcgagctagggagacaagaggccaagtaagctacacaagccctgcatcttcgcagaccactgaaacacagccacagccatcctgatgtctgggatgacggccacctccctggcatgtttctagttgatctcagtgactgctagagacggcatctaacataacaccctctctggtttgccctggggtcgctgggtctcagcactcaaggagtctctccttggtgggaagggatttctctctcttctcctcggtctctgactctgtctttgtctctacctctgtcccttctcccttggtctttgtatgttactcaaattcctgtccatatcaagacaggaaaatggatgagagatccagaaggctgcatatttttcaaaaatgggatgaagttattttccggtgaagtctctgtggcccaggctggactgcagtggcacgatcatagctcactgcagcctcgaactcctgggctcaagcaatcctccccgctcggcctcccaaagtgttgggattacaggcacgaggcatcacacccagccaggaagttcttttatccatggagggggagatggtttctatgaggccttcatgaaaggcactctagaccaggcacagtgtctcacacctgtaatcccagcactttgggaggctgaggtgggtggatcatctgaggtcagaattttgagaccagcctggccaacatgatgaaaccccatctctactaaaaatacaaaattagccaggcatggtggtgcattcctgtaatctcagctacttgggaggctgaggcaggagaactacttgaacccgggaggtggaggttgcagtgagccaagattgcgctactgcactcgagcctgggcaacagagcaagactccgtttcagaaaaaaaaaaaaaaaaaaaaagaaatgcactgtttcctgccaccgtttctcctgcaattcaactccctggccacctgggaagtccctaaatactctctctgtgtgtgtgcgtgtgtgttcgttgactacacatgaccttggataaactcaaattctatctttgatctcgcttgccttagaaagctgagctggccaggcaaggcctgtccctgccacttaagactaattggtacaaggcagcacccctagcaggctctccgagtgggaatctaaatgagctccctgcccggttccccccaccaactctttcaagccatttctgctcccctcccaaacgacctccacccttttccgtgctgtatcttcgacacaccctgcgtgttcaaacctcagggcctttgaacttgctgttccctctgcctggagtgccttttcctaagagagccacatgacccactcttagggtggccagccatcccagtttgcccaggactgaagggtttttggggacatggtattttcagtccacagtgtcaatgctaaacggggactttcctgggtaaacactccctcagctccctcaaaccctgatccgaggtcacctcctcagtgaggtcttccctggctatactgtttaaagctgcaagccaggatcactagctcacacctgtaatccttgcactttgggaagccgaggagggaggattgcttgaacccaggtgtttgaggccagcatgggcagcttagcaagaccctttttctttctttctttctttctttctttctttctttctttctttcttttctttctctctctctctctctttctttcagatagggtatcactctgttgtctaggctggaatgcagtggtgcaatctcagctcattgcaacctccacttcccaggttcaagcaattctcctgcctcggcttcccgagtagctgggactacaggcatgtgcccccacaccaggataattttttttttttttttttttttttagtggagacagggtttcactatattagccaggctggtctcgaactcctgatctcacatgatctgcctggctcggcctcccaaagtgctgggattccaggcttgagccactgtgcctggcctgtctttattttttttaacaacaaaaaaatattttttgttttattttttgagacagagtctcactctgttgcccaggctggagtgcagtgatgtcatcttggctcactgcaacctcctccccccaggttcaagcccttctcctgcctcagtctcctgagtagctgggactacaggcatgtgtcaccatgcctggctaatttttgtattttttagtagagatggggtttcacc[132 bp omitted]ttcccacacccctgggtccccttccctctttcagatgtcttttctctgtgtcacacactcccttctgacaggccatatatattttacttgtttgttcatgttctgtctctcccaccagcatgcagaaacctatgagggatggtcaagatttcttattttgtttcttccccagcactaaaggtgcctggcacatagcacatgcttcataaatatcctttgaatgaatgaatgggtgaattaatgaatgaatggaggacctggtatgtgtccagccctgtcctcagcaatttacatggattagctcatttcatccctctaacattctcctgtacctacaagaaggaggtacagctgagagtcccatttcacaagcgaggagactaaggaatggagggatgattgacgcccgcagggcatcacgtgacacctgacagcaccagcatttgctgctggacaggctgagacccaaacccataaacaaacaacaatttctcacaattctaagtattaagaactttaggccaggcacagtggctcacacctgtaatcctagaactttgggaggctgaggcgggcagtcacctgaggtcaggagttcaagaccagactggtcaacatggcaaaaccccatctctactaaaaatacaaaaattagccgggtgtggtggtgcgtgcctgtaatcccagctactcgggaggctgaggcaggagaatctcttgatcccgggaggcagaggttgcagtaagccacaatcgcaccactgcactccagcctgggcagcagataaagactgtctcaaaaaaaaagaaaaaagaaaaaagaaaaagagaaaccatgctctaatatgaacgtgaatgatgtgggcattgaccagcctctgccctcctcctcagggaacctctcatcctcgcctcctctcactcccaccagccgtgacaccctccctccctcccagtgcccaccccacctgccttgctccatttctctctcagtctgtgcacctgccctgctgtttaatctcctcccccacctgaccctgcaaacatgagtctcaccagggctgagacacggatcttgccaccctcaccccagcacgaggcacacagctggagctcagtaaatatttgtcccacactccctgagtgtccttctccccacacccctcaaggttgctaagcacctgctctatatcaaggacccgctgggggccaggtgcagtggcaggtacctgtaatgtcagtgctttgggagactgaggtgggaggatcgcttcagtccagaagttcaaggccagcctgggcaacatactgagaccccagttcttaagtgccaaggttctgagacaggagcaggcctgttgtgtttgggagcaatgaggccagtgtggccggaggtgaggtcagagaagaacaggggccagatcacgaggccttgaaggcccccacttctcccttggacaaatgcaatcaactcctttttttgtttgtttgtttcagagacagagtattgctctgtcacccaggcttgagtgcagtggcacgatctcggctcactgcaacctccacctcccaggttcaagcaattcttctgcctcagcctcccgagtagctgggattacgggcgcctaccaccacgcctggctaatttttgtatttttagtagcaacggggtttct[142 bp omitted]cgcttaaccctcagatttgtccctcatacctacaggagccagagcctatgatctgttaataatactaacaggatcacatcactcccttgctcaaatacctgccacagctccctattgctcttgacataaagaccagatgattcagcatgcccttcaaggccctgcctgatctggttcccaccccaatctcttcttgcaacatcccgttctctcactgggcccagctggcagcagcaccaaaccctgtctcgctgccaggccctcgccctgccatctctttctccacctcctccactggtcaatgctgctcagatttcattacttccaggaagtttggctacattccctgaacgggccagcctccaggtcacactctcccagaaccacacccatccccctcataaagcaaaacacactcttctgaactcatgtctctgtttaggaagacctggctgcccaggactgtaaactccccaaggacagagcctacatgtacctggctccctgccctatctccagcacctataacactgccagggccaggtgtggtggctcacgcctgtaatcccagcatctggggaggctgaagtgggaggatcacttgagcccaaggagtttgagaccagtctggacaacatggtgagactccctcgcagccatctcaacaaaaatacaaaaattagccaggcatagtggtgtgcgtttatggtcccaggttttcgggaggctgaggtgggaggattacttgagcctggtaggtcagggcttcaatgaactatgatcacaccatggcactccagcatgggcaacacagcaagacccgatctctaacaaaaaacaaaccgaaaaagaacgttgcctgaggctgggtgcagtggctcccgcctgtaatcccagcattttgggaggccaaggcaggtggatcacctaaggtcaagagttcgagaccagcctgaccaatatggtgaaaccctgtctctgctaaaaatacattagccaggcgtggtggcacatacctgtaatcccagctacttgggaggctgagacatgagaactgcttgaacctgggaggtggagattgcagtgagccgagattgcaccactgcactccagcctgggtgaaagagtgagacaccatctccaaaataaaagaatgttgcctggcttggtcagtacttgactaaatagaggactgaatggatagattttttttttttttgagatggagtctcgctctgtcttgcccaggctggagtgcagtggcgcaatcttggctcactgctacctccgcctcccaggttcaagcaattctcctgcctcagcctcccgagtagctgggattaccaccatgcccggctaatttttataattttttagtatagacagggtttcggccgggcgcagtggctcacatctgtaatcccagctctcagggaggcagaggcgggaggatagcttgagcccaggagttcgagacctgcctgggcaatatggcgagaccccattctccacaaaaagtaagaaaaaaaaagacaaaaataaaaaaaaataaataagtagagacaggttttcaccatattggccaggctggtctcaaacccctgaccttgtgatctgcctgcttgggcctcccaaaatgctaggattacaggcgtgagccaccccacccagccaggatggatagatttttttttttttttttttgacagagtctcactctgtcacccaggctggagtgcagtggcgcgatctcagcttactgcaacctctgcctcccaggttcactctattctcccatctcagcctcctgagtaggtgggactacaggcgcccgctaccacgcccagctaattttttgtattttttagtagagacggggtttcaccatgttagccaggatggtctcgatctcccgacctcgtgatccacccgccttggcctcccaaagtgctgggattacaggcatgagccaccgcgcctggcctcagaatggatagatctttaaggaacaatccagctctgagagactacaactgaaacccctgtgttcaacaccttctgtggatccctactgcccacaaaatataatttccttgactatctaaatatccttaatcccgcccttgttttccctagcctagggagtcacaaactttggcttgtatcagaatccaccaggaaggccaaagacctggagattctaattcaagggatctgggcaggggccccagaatcaacatttaaagagcttccaaagtcacgtggctgagagagaagagaaaaaaagagagcttctatgggattttgatggtgatggtgatgatggtgatgatagtgataatgatgatgatggtgatgatgataatggtggtcatgatggtgatggtgagtatggtggtgatgaggatggtgatggtgaggatggtgatgaggatgatgataaggatgacggtgaagatgctgatgatcgtagtgatgatgatggtgacggtgatggtgaagatggtgatgatggtgaggatgatgatgataatgatagtgatgatcatgatggtgattttggtaatgatgatggtgatgatgataatggtgatgttggtgaggatggtgacgtggtaatgatggttacgattgtggtaatgatggtgatgattgtggtaatggtgatgatgatggtgatactggtgaggatggtgatggtggtgatggtgatgattgtggtgatgatggtgatgattgtggtaacaatggtgatggtgatgatggtggtgatgatggtggcaatgatggtgatgctgatgttgatggtgatggtgatgattgtggtaatgacagtgttgatggtgatgatggtggtaatgatggtgatgatgatgatggtgaggttggggatggtaatgatggtggtgatgttggtgatggtaaattttagtaatgacggtggtgatgatgatgaggatggtgatggtggtgatggtgatgattgtggcaatgatggtgatggtgatgatggtggtgatgatggtggcaatgatggtgatgctgatgttgttgatggtgatggtgatgattgtggtaatgatggtggtgatgatggtgatggtaattgtagtgatggtggtgatgatggtgaggatggtgatgacggtggtaatggtgatggtgatgattgtggtaatgacgatggtgatggtgatgactgtggtaatgatggtggtgatgttggtgatggtaaattttagtaatgacagtggtgatgatgatgaggatggtgatggtgatgattgtggtaatgatgatggtggtgatggtgatgatgattgtggtaatgatggtgatgatgatggtggtgatgatggtggcaatgatggtgatgctgtcattgatggtgatgctgtcattgatggtgatggtgatgattgtggtaatgacagtgttgatggtgatgatggtggtaatgatggtgacgatgatgatggtgaggttggggatggtaatgatggtggtgaagatggtgttgatggtgatggtggtgatggtgaaaatggtgatggtgaggatgacggtgagaatgatggtgagggtggtaacaatggtaatgatggtgatggaaataacgatggtgataatggcagcgacacaagtgttcacaagattcctttgcaacaagtgcatgaacaagcagacaaaagtctttgccctcagggaaaacaaaggcaatatgcaaatgttgtcgggatcctggtgtgaacaaatcagctgtaataaaacatttgggaacttctgggtgtatttaaatagagttaaatatgagatggtatcaagacatttctgttaattgtattaggtgatataatggtatttttgttatgtaaaaaaggcctgagcctggacaaaatggtgagactctgtctctacaaaaaaataaaagattggctgggcgtggtggtgcatgtctgttgtcccagcaacctgagaggctgaggtaggaggatcacttgagcctaggaagtcgggactgcagtgagccatgatcatttcactgcactccagcctgggtgacagagcaagacactatctcaaaataataataataataatgctttatttttaggagatgcttactaacgtgtttggaaatgaactgtcattgtgtcgtaatatactttataatactttgacaaaaagaaatatatacatttatgtatatacagacacatatatatggtgtacaaaatgtgaattaatgctaatacaaatgatgggcatataggtatttattatactactatatttttcttttcttttttctttctttttttttttgagactgagtcttgctctgttgcccaggctggagtacagtggtgcaatttcagcccactgcaacctccacctccctgggtccaagtgattctcctgcctcagcctcccgagtagctgggattacaggtatgcgccaccctgccccgctaattttttttgtattttcagtagagacgtggtttcaccatgttagccaggctggtcttgaactcctgacctcaggcaatccgcccgcctaggcctcccaaagtgctgggattacaggcatgagccactgcatccggtctat[135 bp omitted]accctgtctctcctaaaaatacaaaaattagccgggcatggtggtacatgtctgtagtccagctacttggtaggctgaggcaggagaatggcttgaacccaggaaggcagaggttgcagtgagccaagatcatgccattgcactccagcctgggcaacatagcaagacctcctctctactgaaactaaaaaaaaaaaaaattagtcgggtgctgtggcatgtatctgtagtcccagctactcggcgggctgagaggatgaggtgggaggatcccttgagcccaagagttcaaggctgcagtgagctgtgatggcaccactgctcaccagctgggaagacaaggaaaggaggaaagaaggaaagaaaaaagggagggagggaggaaggaagaaagagagaaagaaagaaagggccgggcgcagtggctcacacctgtaatcccagcactttgggaggctgaagcaggcggatcacgaggtcaggagattgagatcatcctggccaacatggtgaaaccctgcctctactaaaaaaaaaattagcccggtgtagtggtgcgtgcctgtaatcccagctactcgggaggctgaggcaggagaatagcttgaacccgggaggcagagattgcagtgagctgagatcgtgtcactgcatgccagcctggcgacagagcaagactctaaagaaagacaaaaaaaaaaagaaagaaagaaagaaagaaaagaaaagaacaatggggagtttcagtacacatgaattatctgtactattctaggaatattttgtaagtcttaaattatgtcaaaataaaaataaaaagcattctaatacactggtggtatggtacgcatgaagttcctactgataaaattgtatgatctgggctgggtgcggtggctcacgcctcccagcactttgggaggccgaggcaggcggatcacttgaggtcaggagttccagaccagcctggccaacatgatgaaacctcatctctactaaaaatacaaaaattagccaggtgtggtggcgtgtgcctgtagtcccagctatttgggagggtgaggcaggagaatcacttgaacccagcaggtggaggttgccatgagctgagatggtgccactgcactccagcctgggcgatagagcgagactccgtcgcaaaaaaaaaaaaaaaaaaaattgtatgatctgggtggtggtggggggcaggagtcaacgggtagagcaagttattcttgctttgttttgtttgagacaagttcttactctgttgcccaggctggaatgcagcggcacaatcatagctcactacagcctcaacctcctgggctcaagtgatcctcctcagcctcttgagtagctgcgactacagatgtgtgccaccctatctggctaattttgtttatttttggttgagatggggtctggtgctatgttgcccaggctggtcttgagctcctgagctcaagtgattttcccacctcagcctcccgaagtgctgagattgcagcatgataaatattgataagagtttcatgggtatttaatctaatctcattaaatcctcagaacaactctgtcacaattggccccatttcacaggtgagaaaacagaggagcagaaatgttgcgtaacttgcatgacgttgcaggtaagaagtggcagagaatttaggcaaacaagccacttgttatttctgcctccctgccccgcaggtcctgttgaccaacttgaccaactttatttatttatttattttgagatggagtcttgctctgtcacccaggctggagtgcagtggcgcgatctcggctcactgcaagctccgcctcctgggttcacgccattctcccacctcagcctcccgagtagctgggactacaggcacccgccac[186 bp omitted]tttatgtgaaatctgccttgtgaaatgttggcaatgaatgaaaaaagataggccggacatggtggcttacgcctgtaatccgagcactttgggtggccgaggcaggcagaccgctatagctcaggagtttgagacctgcctgaacaacatagtgagacccccaactctacaaaaaatacaaaaatcagctgggcgtagtggtgggcacctgtagtctcaggtcctcgggaggctgaggcaggagaatttattgagcccaggtagtcaaggttgtggtgagccgagatcctgccactgcactccagcctgggtgatggagcaagattgtctcaaaaaaaaaaaaaaaaaaagtaaaagaaaagaagaaaatatatatatatatacacacacacacacacacacacacacacacacatatattaactcttcatgggctgaggtgtaggtgtgttttatgtgtggaggtgtttttagtgttgggttaatcctagaaagtcaacacaaatttggaacaggagccagggttcactggttaagcaggggattgcccaacctcccgggaacatttcacctggatcttggatgcgacctcagagtcagcacctgaagctccctggacactgggcccgcccccaggcctctcccctctttgcctactcttgctcccctgagttcctccagcctcaaactggtcagctgcaagctggtatctccagagccccacctccacgatctcatgcccaatgcccattcccaccaggacgtccaccaggcagttcatgttcaacagcgcccccgccaggctttcctgccacagtgaatggcagctctgtccggtcagttgctcagttgctgg[136 bp omitted]ctgcctcagcctcataagaagctgggattacaggcgcccaccaccacgcctggctaatttttgtatttttagtagagacggagtttcaccatgttggccaggctggtctcgaactcctgacctcatgatctgcccgccttagcctcccaaagtgctgggattacaaagacatgagccaccgtgcctggcaaggacagggattttcttctgttgtgtgttcatagctgtatgcgcagggctccgcatgttgctggtgctatataactatttgttgagttaattaattaaaaagtgctatgcggagaataaagatgttatggagagtggatgtttgtgtgcagctgttgcataagcaagggtgagggaaaggctttgatgtgtgttcttctccttcgtttttttttagatagagtcttgctctgttgcccaggctggagtgcagtggtgcaatctcagctcactgcaacctccatctcccaggttccagcaattctcctgcctcagcctcacgaggaattgggattacaggtgctcaccaccatgcccagctaattttttgtgtatttttagtagagacggggtctcaccatattggacaggctggtcttgaactcctgatgagtgatccacccgccttggcatcccaaagtgctgggattacaggtgtgagccaccgtgaccaacccttctccttccttttttttttctttttttttttttgagacggagtctcgctctattgcccaggctggagtgcagtgatgcaatctcggctcactgcaacctccgcctcccgggttcacgccattctcctgcctc[212 bp omitted]gaatcaagagaggcggtgattacaaaagttgttcatcaggaattgtcattggtttacagacatcacattgattagtgattggctatacatgtttgaactatagagtgtgtgacactctagagctacttggtatcaggtcgtctagagtccagaaaccaagtagcctcaaaaggtaattattggatgggtgcagtagctcatgcctgtaatcccagcttgaggcaaggagttcgagaccagcctgagcagcatagaaagaccctgtctctacaaaaaagttaaaaattagtcagtcatagtggtgcacccctgtggtcccagctgctcaggaggctgatacaagaggatcacttgagcccaggggttcgaggctgctgtgagctatgatggtactccagcctgggcaacagagtgagtccctgtctcaaaaagtaattaaaatacatttttataaagtccctctgagccaggtgcggtggctcacacctgtaatcccaggagtttgaaaggctgaggcaggagaatcacttgagcccaagagtttgagaccagcctggacaacatagtgaaaccccacctctattaaaaaataaaaaggccaggcacagtggctcatgcctgtaatcccagcactttgggaggctgaggtgggtggatcacggggtcaggagttcaagaccagcctggccaacatggtgaaacctcgtctctactaaaaatacaaaaaaattagccaggcgtggtggtgagtgcctataatcccagccactagggaggctgaggcagagaattgcttaaacctgggaggcagaggttgcagtgagccgagattgtgccactgtactccagcctgggtgacagagtaagactctgtctcaaaaaataaattaattaatttttaaaaaagttgttaaaaagcccctctgggcctgatcctgatcatctaaaggggctctcctttctcagataaaaaagtttgttttctttctcattccctccccagctctcccccaattcttgtttaagacaaggactcgctctgttgcccaggctggagtgcagtggcacaatcacggctcactgcagcctccagctcccaggttgaagtgatcctctcacctcagcctcccgtgtagctgggattacaggagcaccaccatactcagctaattttttttttttttctgagaaagagtttcactctgtcacccaggctggagtgtagtggcacaatctcagctcactgcaacctccacctcccaggttcaagcaattctaccgcctcagcctcttgagtagctgggattacaggcacctgccaccacgcacagctaatttttgtatttttagtagagatggggtttcaccatgttggactcctgacctcaagtgatctgtccgccttggcctcccaaagtgccaggattacaggcatgagctaccaggcctggcttttttttttttttttttttttgtgagacggagtttccgctcttattgcccaggctggagtgcaatggcacgatctcagctcactgcaacctctgcctcccaggttcaagtgattctcctgcctcagcctcctgagtagctgggattataggcatgtgccaccacacccggctaattttgtatttttaatagagatggggtttc[135 bp omitted]tattttttttttgagacaaggtctcactctgtcacctaggctggagtgcagttgcacgatctcagctcactgcaacctccgcctcctgggctcaagctgtgataccctaaccttgttttaacctgaattgactctcccttaggtgagcgagccagacagactccatcctggctccttcacttgcagccccttaacccaacccccctttcttcaaggacttaacttgtgcaagctgactcccagcacatcaaagaatgcaattactgataagatactgtggcaagttatatccgcagttcccaggcagtcgcccgattaatagtaccctaagcccccgcgtttctgtctggttgatagcgcccaacgtccagcgtctatcaccttgggatgtgtttaaagcccctgcacctggaactgtctgctttcctgtaaccatttatctttctaactttttttgcctgctttacttctgtaagattgttttaactagactcccccctcccctttctaaaccaaagtataaaagaaaatctagccccttcttcggggccgagagaattttgagcgctagccgtctctgggctgccggctaataaaggactcctgatcttgtctcagagtgtggcgtttctctataactcgctcggttacaacaaagcaatcctcccgcctcagcctcccaagtacctgaggcgcaccaccatgctcaggtaatttccgtattttttgtagagacgagggtttc[131 bp omitted]tatttttgagacagcatcttgcaatgttgcccaggctgtatgcagtggtgtgtacatagctcatggcagccttgacttcctgggctcaaacgatcctcccacctcagccacctgagtagctgggactacaagggcaccactacgcctaattttttaaactttttgtagagatggggggtttcgctgtattgccccagctgtcttgaactcctgacctcaagtgaacctcccacaaggacctcccaaagcactgggattaaaggtgtgagccactgtgtctggccccaatatgttcttaacatcccctcctaccaccaccagtctggaaggttctagaaggttcctaagactgggctatgtagctacaaaggtagatttgctggatgtagagattcgcagtcatttatcttccttttggaataaggagattaaactaaataacagaaaatagatggccaggcgtggtgactcaagtctgtaatcccagcactttggaaggccaaggcaggcagatcacttgcagtcagaagcatagctaccaaaaattatgaaatttagctggttttgtggcccgcacctgtaatcccagttactcaggaggctgaggcacgagaatcgcttgaacccaggaggtggaggttgcagtgagctgagatcacaccactgtcctccagcctgggcgacagagagagaccctgtctccaacaaacaaacaaataaaaagaacggaaaacattttgctcttagacaaaatgcatcacacaatccacctatcaggaggctgctcgggcctggcggcagggtcgccagccctcaccttggtcaaggtgtacgtccccagtaggttcagctccagcagctggcggaatccctgggcagaggtctcctcaggcctctgtgggggtgggtctaaagtggggggtgagagagagaggaaaagtgacgggggctggacacagttgcccacgcctgtaatcccagcactttgggaggctgaggcaggcggatcatgaggtcaggagttcaagaccaacctggctgacagggcaaaaccctgtctctacgaaaaatacaaaaattagctgggtgtggtggcgggtgcctatattcccagctactcaggaggctgaggcaggagaattgcttgaacctgggaggtgcaggttgcagtgagcctagatcgagccactgcactccagcctgggcgacagagtgagaccccatctcagaaaaaaaaaaaaaaaaaaagccgggtgcagtggctcatgcctgtaatcccagcatttggggaggccgaggtgggcagatcatctgaggtcaggagttcaagaccagcctggctaacatgatgaaccccatctctactaaaaatataaaaattagcctggcgtgctggtgggcgcctgtaatcccagctacttgggaggctgaggcaggagaatcgcttgaacccaagaggcagaggttgcagtgagctgagatcacaccactgcactccagcctggacgacagagtgcgactccatctgaaaaaaaaagaaaagaaagaagagaagagaagaaaaaagaaaagaaaagaagagagacatggccaagtgagggcacagccctggggacacacaggagggatggaacagggccacagtttcagcacaggcctggggggcttccattgctttactctcctgtccaagtggctagaaagaggtatgaggcaggatgagggaatcaggggcagggagtggggaaactgacgtgcaggaaacagagttggggggcaggaggtggagaatggccctggggtctcacaactcacggtggccagcgttgttgacaacacaatccaggcggccaaatcggcggatggtctcagaaaccagggtctgaggagaaaggaaatgtcctttgttttttttttttggagacggtgtctccctcttgtcactcaggctggagtgcattggcacgatcttggctcactgcaacttcagcctcctgcgttcaagcaactctcctacctcagcctcccaagtagctgggattacaggcgactgccaccacgcccggctaatttttgtactttttagtagagacagggattcactaggttagccaggctggtctcaaactcctgagctcaagtgatccacccgcctcagcctcccaaagtgctggaattacaggtaccacgcccagcccaggaaatgtcctttgaatgagcagtagatggggtgtccagccataaagaagacagggctcccaaatgcaaggcaggagggggaagctgaactcccaggtcaggggacaagagctagaggaagaggggactccgagatcagcagacacagcaggcaagcaggagacaggaaggagacagggggctggtcagagccacactgcagtcgtcacacccagggtcagggggtggggcaggggggtgacaaggattcagagagcgcgtaggggacagttgcccaaggggggcagataacagagagatactgattaaaaggaagaaataggaacccagaaataatggagaaaaaatcagttacatacaggccacgtgcagtggctcacacctgtaatcccaacactttgggaggctgaggtgggcggatcacctgaggtcaggagttcgagaccagcctggccaacatggtgaaaccctgtctctactaaaactacaaaaattagccagacacggtggctcatgcttgtaatcccagcactttgggaggctgaggcgggcggatcatctgaggttgggagttcgagaccagcctgaccaacatggagaaacaccgtctctactaaaaatacaaaattagccaggtgtggtggcacatgcctgaaatctcagctactcgggaggctgagagaggagaatcacttgaagctgggaggcagaggttgcggtgagccgagatcacaccattgcactccagcctgggcaacaggagcgaaactctgtcttaaaaaaaaaaaaaattagccgggcatggtggcgcacacctgtaatcccagctactcgggaggctgagataggagaatggcttgaactcggtaggctgaggttgcagtgagccgagatcacaccactgcactccagcctcagtgacacttacaaaaaaaagagacagaaaaatcagttccagttgacccactttgagggacttattcatttccatccacatgttaaatgtgctaagagccttggagaggtgtgacagaaggaacatgtgacctgcccatcagtcacagaagaccttgtgtgtggagtgacactgggtggaaacctttgacgagtccagcggagccaggagaggaaggaaaagtagagggaaaggcatatgcaaatggctggaggagaacaaagaactggtcattagcggagatgggggtaggaacaggaactcggcttaccttcacatcatcttcctgagtcacatcacagaggataaagacagctccagggagctcctgctccagggcccggcccccagactctgcagggagagaagagctgggagcctggacccctgggtctcagggaggaggggttggggacttggactcctgggtctgagggaggaggtgctgggggcctggactcctgggtctgagggaggaggggctgaggtctggactcctgggtctgaggaagtagggcctgggggcctggactcctgggtctgagggaggaagggctgggagcctggactcctgggtccgaggaagtagggcctgggggcctggactcctgggtctgagggaggaagggctgggagcctggactcctgggtccgaggaagtagggcctgggggcctggactcctgggtctgagggaggaagggctgggagcctggactcctgggtctgagggaggaggggctgggagcctggactcctgggtctgagggaggaggggctgggagcctggactcctgggtctgagggaggaggggctgggggcctggactcctgggtctgagggaggaggggctgaggtctggactcctgggtccgaggaagtagggcctgggggcctggactcctgggtctgagggaggaagggctgggagcctggactcctgggtctgagggaggaggggctgggggcctggactcctgggtctgagggaggaggggctgaggtctggactcctgggtccgaggaagtagggcctgggggcctggactcctgggtctgagggaggaggtgctgggagcctggactcctgggtctgagggaggaggggctgggggcctggactcctgggtctgagggaggaggggctgaggtctggactcctgggtccgaggaagtagggcctgggggcctggactcctgggtctgagggaggaggtgctgggagcctggactcctgggtctgagggaggaggggctgggggcctggactcctgggtctgagggaggaggggatgggggcctggactcctgggtctgagggaggaggggctgggagcctggactcctgggtctgagggaggaggggctgaggtctggactcctgggtctgagaaagtagggcctgggggcctggactcctgggtctgagggaggaggtgccagagcctggactcctgggtctgagggaagaggggctgggagcctggacccctgggtctgaaggaggaggggttggggacttggattcctgggtctgagggaggaggtgccggagcctggacttctgggtctgagggaggaggggctggggacctggactcctgggtctgagggcagaggggctgggggcctggactcctaggtctgagggaggaggggctgaggtctggactcctgggtctgaggaagtagggcctgggggcctggactccggggtctgagggaggaggtgctaggggtctggacctctgggtctgagggaggaagggccaaggtgagggctgagggaccgtcactcaccatccttgtcgcagataaccactcgggccccgctgttcactgagaataggaagggaacaggttactctccgagccttggttaaagcctctgccgccctcttgtggccacctggattggggctgatctccctctcccctcgtgaccccagtctcatgatcacccataggacagagggcagacgccttgacacatactctccttgccttgtttctgctgaggctcctgaacccccgttcgtggcttccggagcaaactccacgactgacagagccattcctcaaaccactggttttgtagctacaccaacagacccagagaaaggggccactgccttcggagaccctgccagactcagccctagcctacagcgccacacgcttactttagcctgcaaattggcttttataatatcagaatcctggctgcagtactggagtccctattttccgcccccatcaccccgcccccatccttcctttctcacactccacagctcccagcagtcagacccggctcaccgaaggcgcgcacgatcccagctccgatgccgcgcccgcccccggtcacgaccaccaccttcccggcatagcgcgttcccgtagccatcccgtgtacgtcggtctctctctctctctactctgggcctctttcacctccaaagccccgtgaggccgtcgcatcaaatcctcaatagaggctggatcctggaagtccggcctcggggggcgttgccaggaaggctagagacctggaagtttgtccccagcccctcctccctcagacactcctctcttcccacagacccaggaatccaggagccccagtccctcctcccacagacccaggaatccagaagcctcagtccctcctccctcagactcgggagtccaggcccccagcccctcctccctcagactcgggagtccagcctcccagcccctcctccctcagacccgggagtccagcctcccagcccctcctccctcagacccaggagtcagggtcccagcccctcctccctcagacccgggagtccagcctcccagtccctcctccctcagacccaggagtcagggtcccaccccttcctccctcagacccgggaatcctggcccagccccctccactctcagaccgagggatcaggttctctatcccttcttcccagagacctataagtccaagccccctgtcccttcctctctcaggacccaggagtccacgactccagctctgcccctcagagacaccagtgccacaaccccagacagacagaaagaaagctattgactaaaagttcaaagttttaatccaaatttagacagtgttgagaaaaccaaactttggccatagaaaccattcccctcccgggcccgcaatggggaccagaccacgccccctgatgccctgagtggtcccagatctccggcggtacctccagaccacgtcctcgcgctccgattggctgccgcttttgggcggattagaagctggattgtagcagagtgactcgcagaggccatgccccctcgtcttgtggcaggaccggaggggcgatcccggcatcccacgcgggcccccagggggtgggacctcctccacgcccactccctcggcgagagaaccccgtggaacccgaattagccaccgggggagatctggggggaggggtctcctggcgcgtggggtccgaaggaggcagcggcacaccgggaagagggtctccctgggagtccaaatttccacctggagaggatgagtgggacatgagaatggcaaacctcagcgctaggaccccggattcccagcccctcctccctcagacccaggactccggattcccagcccctcctccatcagacccaggagtccaggcccccagcccctcctccctcagacccaggagtccaggcccccagcccctcctccctcagatccaggagtctggatacgccagtccagtcctctttgagactcagttgtcggccctctccccgccccctgacctcttcctcccctcctcccaagtgtcccggaccccagtcacctcttgcctgagacctaaaactcccaaaccctgcccaactctttactcaccaagataaaaaattctcaccggcccccagacccctcctctccaggacctgggattccaggtctccagctctctcctccctaaaacccagaagtccaacatccccagccagtcacctgtcatcattctgtgccactgcgacgcctcagtagccagggcttgggagaggctgagaacccgctcccggtgaccttcggaagtcggcaagtaaggggtggtgttccttggactagaaaaaaaaagaagattgggggtgggggtgtgtacatgggggagaggtgggggatggttaattggtacaaaaagaaaaggatgaataagacctactattagatagcacaacagaatgactatagtcaataataatttaattgtacatttttaaataaattaaagggtgtaactagattgtttatacatcaaagggtaaatccttgaaaggggatggataccctattcccgatgatgtgcttatttcacattgcctgcctgtatcaaaacatctcaattatctcgtaaatatatgtatacctagtatgtaccaacaaaaattaaaaattaaaaaaaaaaaaaaaaaagcaggccaggtgcgacagcttatccctgtaatcccagcaccttgggaggccgaggcgggcggatcacttgaggtcaggagttcgagaccaccctggccaacatggtgaaacccagtctctaccaaaaaatacaaaaaagttagccaggcatggtggtgggtgcctgtaattccagctactagggaggctgaggaaggagaatcatttgaacccagaaggcggaggttgcagtgaactgagatcacgccattgcactccagcctgggagacagagcaagactccgtctcaaaaaaaaaaaaaaagtaaaaaataaaaataaaaataaaaaataaacagctggcacagtggggacccgggtaccgcacgtgcctttctgggagttgtagttcctagcacgtgtctctaaaatacgttaaacatggcaccgccctcataccgcccacatgcattacgggatttgtagtccactcgcgcgtcactatcacccaatttccttgatgcagaagtaggatctgctattgaccaagggaatttgaggaactaaagatatcactacggatctagggctttctggttttgttgcagatgccccgggaacttaagcatctctagaagggttgcgatttgtacttccatattcaggagactttaataataatgctactcccctttgcttttgcaaatttttttttcctgctcccttgatacgccctccagttccttacctactccaggacccagagcttctgagccatttctgggctcccgagtgtcctacgacaggctggaaaggaattggggcattagaactcctcacctggaagccccacgttctcattttgagggtgaagtgaagggggctccaaaagagaatgaaattgcccaaaaacactggcaatgttttgttttgtttttcctatgcttctgtaggcactgaatttttaaaaattaatttattttatttattcattttttagaaaggatggagtacagtggtgtgatcataactcactgtagtctcgacttcccaggcttggactaatcctgcttcagcctcctgagtaaatagaactacaggctcgcaccaccatgcctggctaattatttttatttttatttttagtagagacagagtcttgctatgttgcccaggctggtctcttactcctgcctcggcctcccaaagtactggtattacaggggtgagccatagcacccagtgactgacaatgtttaactttacctgtgttcctataaagcagcacatgagttcagaaatcccacctccaccaccaccacctgtgactt[216 bp omitted]aggctaaggcaggagaatcgtttgaacctgggagacaggggtcgcagtgagtcgagattccaccactatactccatcatgggcaacaaagggagactctgtctcaaaaaaagaaaaaaaaaatctaaggggaggttaggtgcagtagctcacacctatattcttagcacctccttccaaggcaggaggatcacttgagctcaggagctcgacaccagcctggccaacgtggtaaaaatctgtctctactaaaaatacaaaaattggctggatgtagtggcatatccctgtagtcctagctactcgggaggctgaggcatgaaaatcacttgaacccaggaggtggaggttgcagtgagtggagatcgcaccactgcactctagcctgggcgaccttgtccctgaaaaaaaaagaaaacatcttttttttttttttttttgagacagagtttcactcttgttgctcaagctggagtgcaatggcaaaatcttagctcaccacaacctccacctcctgggttcaagcgattctcctgcctcagcctcccaaggagctgggattacagacatgtgctaccatgcccagctaattttctatttttagtagagacggggtttctccatgttggtcaggctggtcttgaactcccgacctcaggtgatccgccctccttggcctcccaaattgctgggattacaggcgtgagccaccatgcccggccgaaaaaggaaaacgtctaaggggaaaccatcctgagatatctgagacactctgatgttcagatctgggacgttcttcctattgaaagggcatgaataaaatcaattttcttcctggcttacattttcttttttgctttcttgctattgacaacacatagcaactgagaagaaaaactaggcttccaatccagatgtgtgacccccgcccccacccactgtcctcccctcactgccactcctgtccacccaccactatccaggcgaggaagctgactctagcacaagtacaaactggggtaaattcggaaatccagtttggaggaaggaggtagtgattatctccattttacagaaagggactcaaagtaggcgaagaggacctactaccaccccaccgcccagccccagccctcctcccctcaccctttgctccacgtcaggctggcgtctggctggggacagtgtccttcccagggtgagaagccggggggaggtcgggcgagggaagggccgtccacattcctggtttctgcgcatccgctccagctgctcctgggcactcatccggggccgggccaccggggcctagggaggcgagaaacgtcccaagacccaacctttaggccaggcacagtggctcgtgtaatcccagcacttttgggaggctgagtagagaggatcacttgaggtcaggagttgaagaccagcctggccaacttggcgaaataccatctctactaaaaatacaaaaattagctgggcgtggtggcaggcacctgtaatcctaattactcaggaggctgaggcaggagaattgtttgaaccccagaggtggaggttgcagtgagccgagatcacgccactgcactccagctgcacaacagagcaagactctgtctcaaatatatatatatatatatgttgcttaaacaaggagagagggagaaggccgggtgcagtggtgggtgactgtaatcccagagctttgggaggctgaggtgggaggatcacttgcggccaagagtttgagaccagcctgggcaacatagcaagaccccatctctacaaaaaataaacttgttagatgtggtggtggatgcctgtcagctactcaagaggctgaggcagggggatcacttaagcccaggagttcaaggcttcagggagctatgatcgtgccactgcacctcactctgggtgacagggcaagatcccgtatctaaaagtaaaaagtaaagacagagagagcactcattgctgaagcttccagttaaacatcccagtgagatagcatggatctgtgcttattgtagaaccagtccctgcagtttcctctgctttgaccaatcctgagtcctgtttatataa[135 bp omitted]ccgcctcctgggttcaagcacttctctgcctcggcctctcaagtagctgggattgagtaggtggcacccgccaccacgcccagctaatttttttgtatttttagtacagacagggtt[145 bp omitted]aaagcttggtagcagcacactcagatttctacacatccaattgttttaaacatagtcttaataagcaggtatttttagctatgcagtctgcctgctttgtataccctgaaactgtgcccaacatctgctacccatagataagatgagccccaagcccctgctgctctttggacctctctgatccagagaaacctccacatgctggtggctggcatcacccagaagtaagccccttctccagtccctttctcttgggagctcccttgccttcctcccttcctgtgcagtggtcctcaccctcacacagtaacctctggagggtctcacactgggtgtgactcccccatagacaaatctgtcagtgtccaccaaataaagctcctgtgtgctactgccatctggtggtcatagctttttctttgctaaaccctgaaatccctggaactcactagaccacccctgtgctctggaccttggcagcccctgaaaccacccggttggggtgagggaggagcatgtcccaagataagtgatgttcccagcaggctccaatcatccatgcccatgacacaccactgagaatcaaaaagtgcctctcctctcttcctaggaaaggctcgattgcttttgtatccatgataacaagtaagcacaagaaatgccttcttttttttaaattattttattttattttattttatttttgagatggagtttcactcttattgcccaggctggagtgcaatggcacgatcttggctcactgcaacctctgcctcccaggttcaagcgattctcctgcctcagcctcccgagtagctgggattacaggcatgtgccaccacgcctggctaatttttttgtatttttagtagagacggggttacactatgttggtcaggctggtttcgaactcctgaccttgtgatccgcctaccttggcctcccaaagtgctgggattacaggcgttagccaccgcacgcggtcttttttcttttttttttttaaagacatggtttccctctgttgcccaggatggagtgcagtggtgcaatcatggctcagtgcaggcttgacctcctggactcaagcaatcctcacgtctcaacctcccaagcagctgggaccacaggtgggcaccaccacgcacagctaactttttattttttatttttttattttttgagatggagtcttgctctgtcacccaggctggagtgcagtggcgcagtatcagctcactgcaatctcagccacccaggttcaagcgattctcctgtctcagcctcctaagtagctgggattacaggtgcgtgctgctacacccggctaatttttgtatttttagtagagatgggtttttgccacgttggccagggtgctcttgaactcctgacctcaggtgatccacccgcctcggcatcccaaagtgctgggattacaggtgtgagccactgcacctggccacagctaactttttattatttttttgtagagatgggtcttgctacgttagccaggctgctcttgaacgcctggactcaactgatccacctaccttggcctctcaaagtgttgggattacaggcatgagccaataccactggccaagaaatgccttatttattttattattattattattattattattattattattattattattattattttcgagacagagtctcgctctgttgcccaggctggagtgcaacggtgcaatcttgggtctttgccacctctgcctcctgggttcaagcgattctcctgcctcagcctcccaagtagctgggattacaggcacccgccatcacgctcggataatttttgtatttttgtagagacagggttttc[132 bp omitted]aagtaatcccaacaggtaccccaaagacttctgaaagccagccaatcagtgatggagccaagcttctgaaaatcagccaatcagtgatggtcacatgcttctgagggctggccaatcagtgatggatccgtacttctgaaaatcagccaatcattgatagctccatgcttctgaaaaccagccaatcagcaacagacacagagcacagagcttccacagcttaaagtcaaccaattcctaaacattcctgccactagaagtcaaccagtttct[133 bp omitted]ctgcaacctctgcctcccgagttcaagcgattctcctgcctcagcctcccgagtggctgggattacaggcgcccaccaccacgcctggctaatttttgtactttt[133 bp omitted]ggttctgctattagccccattttagagaagaaaaaatgaaggcacagagaggtttaataactgacccaaagtcacacagcttagaagcgacagagacaaaaatcaatctcaatgctcttaacaagcagtgctctctctgctctgagtatggccttagaacgctctactcctagctgtttcccagaagtgtgggggtccctgatggtcagatgcaaggattacaggatggacctacagcttaccttggttcctagctgtggggaagggaggtggcgaccctcagggctggaagcccgggagaccctcggagacccaagacctggaaagacagaacgggacttggtgaggacgggaatttccgtaaagtcccacccaaccaggatgctcacctaagtgagggctggcgaggtctttgtcgcctccaggaggccgcccccagtcagtctcgggggacctaggggagctcagttccaaggactctggcaggctctgcggggattagaaaagggggataatgatgatcattataataattattattattaccatgttgcaagcatttaggcattggaatacagtctgaataggattcagaccataaaccaggccgggcgcagtggctcacacctgtaatcccagcgctttgggaggccgaggcaggcagaccacctgaggagttccagaccagcttagtccaacgtagtgaaaacccgtctctactaaaaatacaaaaattagctgggcgtggtggcaggcgcctgtaatcccagctacttaggaggctgaggcagaagaatcgcttgaactcgggagttggaggttgcagtgagccgagatcgcaccactgcactccagcctgggcggcagagcaagactctgcctcaaaaaaaaaaaaaaaaaagactataaaccagatctgagcatggaggcttgtgcttgtaatctcagccctttgagaggccaaggtaggaggctcacttgaggccaggagctagacaccagctgggcaacatagcaagaccccttcccttaaaaactttttaaggctgggcgcggtggctcatgcctgtaatcccagtactttgg[136 bp omitted]ctgaggcaggagaatggtgtgaacccgggaggtagagcttgcagtgagccaagatcgagccacttgcactccagcctgagcaacagagagagactccatctcaaaaaacaaagcaaaacaaaacaaacgttttaggctgggcacagtgggttcacgtctgtaatcccagcattttaggaggccgagatgggaggatcacttgagaccaggaggtcaagaccagcctaggcaacatagggagaccccgtctctacaaaaaagttaaagaattcgccgggcatggtggcagacacctgtagtcctagctacttgggaagctgaggtgagagaatcacttaagccccagagatggaggttccagtgagctgtgatggcaccactgcactccagcctgggtgacagagcaagaccctgtctccaaaaaaacaaaaaaactgtaaaccaggagccagatgtcctggcttcaaatcccaactgtgccatttattagctgtgtgaccttcggcaagctgctttacctctctgagccatattttattttatttgagacacagtctcgctctttcagccaggctggagtacagtggtgcaatcttggttcagcttactgcaacctctgcctccctggttcaagcgattctcctgcctcagtctcccaagtagctgggattacaggtgtgcaccactgtgcctggctcattaacattttactttttgatattaggattgagtccatatatatgtggcacttagaacagtgcctggtgtctaagtgcattatatatataatcatattagggctgggtgcggtgcctcactcctgtaatcctggcgttttggaatactgagactggaggatcattttaagccaggagtttaagaccagacttggcagcaaagtgaggttccatctccacaataaacaaacaaccaaaaattagccaggcatgatggcacgagcctgcggtcccagctactcaggaagctgaagcaggaggattgcttgagcccaagaattcgaggctgcagtgagccatgatcacaccactgcagtccagcctgggcgacagaatgagatcccatcttaaaaaaaaaatcctggttgggcgaggtggctcacgcctgtaatcccaacactttgggaggccgaggcaggcggattactcaaggccaggagtacatgaccagcctggccaacaaggtgaaactccgtttctactaaaaatacaaaacttagccaggcttggttgtgggcacctgtaatcacagctacttcggaggctgaggcaggagaaccacttgaacccaggaggtggaggttgcagtgagccaagattgcaccactggactccagcctggatgacagagtgagactacgtctcaaaaaaacccccgaaaaaaaagaaaacaaaggcttccagaggttaggacacttgtaccaggtgggttagctgatcaaggaagaattaaagaggtgggtggggaatagactgagtcaaggacaggtgggacatgaagcttggggtggggaggaattatgtgcgtcttacctccctctctgaggactcctcgccctggagcacgggagatggggagtcaggctcagtgtgtgggggcggtttctgggggccacccagacctgccagcgtgtcttccaccatccacagctgctgctgagcagacactctgtcctgcagggaggaaaggaatttgttacttaaaggtgggaaaacgcaggagggtttcagctaataggcccctgcaaaggtctgaaatcagctgggctatatttatggagttgggatttattttt[224 bp omitted]gaggc[138 bp omitted]cacctgtaatcccagcattttgggaagccgaggcgggtggatcaccagaggtcagaagttcaagaccagcctggccaacatggtgaaccctcgtgtctactaaaaatacaaaaaaaaattagccgggggtggtggtgcatgcctgtgatcccagccactcgggaggctgaggcaggagaattgcttgaacccaggaggtggaggttgcagtgagctgagatcgtgccactgcactccagcctgtgcaacagagcgagacactgtctcaaaaaaaaaaaaaagaaaaagaaaaaactgtcttttctttctatgttgttttactgtgttacatctattataaataggtgaccatacgaatatgagagtctgttctttttgtttgtttttggagacagtccctccctctgtcacccaggctggcgtgcaatggcttgatcatagctcactgcatcctcgaactcttgggcttaagcgatccttccacctcagcctcctgagtaactgggaccacaggcgtgcacaaccaggcccagctaattttttcacttttatttttagtagagacagagtttcaccatgttgcccaggctagcctcaaactcctgggctcaggtgatccacctgcctcatcctcctaaagtgctgggattacaggtgtgagccactgcagctggcatgggtctgttcttgccaagtctggattgtagatctagtgggagcagcttagagtgagaagatgcatttaaaactaggcatcaatggttttttgttttttggggttgttgttgttgttttttaagatggagtctctccctatcacccaggctggagtgcagtgtcacgatctcggctcactgcaacctccgcctcccgggttcaagcgattctcctgcctcagcctcctgagtagctgggactacaggcgtgcaccagcacacccagcaaatttttctatttttagtagagacagggtttcaccatgttcgtcagattggtctccaactcctgacctcaagtgatccacctgccttggcctcccaaagtgctgggactacaggcgtgagccaacacgcccggccgtgtcaatgtttttaaagatacatgatttagaacttgatggctagatttagagtgaaaaagcaggtctgaggctaagcaatgaggtttatattttaggagcagagcttgcactaaaggaatgggttcagaactggaactccagaggataaatttaacagcaaaagtcaggatgcaggatgcaagagatgaacttgcaagatggaaaaaaggctgagggttggagttttgctggtgagagcatggcttcaacaagaggagagatttagaaccaggggagagagcagctctggatctgaagtaggtattaaaacgaaaggcattggccgggcgcagtagctcatgcctataatcccagcactttgggaggc[134 bp omitted]aggagaatcacttgaacccgggaggcagaggttgcagtgagccgagatcacaccactgcactccagcctgggcaaca[148 bp omitted]ctactaaaaatacaaaaattagctgggcatggtggcacacacctgtagtctcagctactggggaagctgcggcaggagaattgcttgagcctgggaggtggaggttgcagtgagtcgagattgtgccactgcactccagcctggcgacagagcaagactatgtctcacacacacaaaaaaagaaaataaaaaatagaagggctgtgtgcggtggctcacgcctgtaatctcagcactttgggaagctgaggcgggtggatcacctgaggtcaggagttcaagaccagccggaccaacatggagaaaccccgtctctcataaaactacaaaattagccagacatggtggtgcatgcctgtaatcccagctactcgggaggctgaggcaggagaattgcttgaacctgggaggcggatgttgcggtgaaccgagattgcaccattgcactccggtctgggcaacagaacgagactctatctcaaaaaatataataaaataaataaaataaaaataaaagagtaggccaggcacagtggctcacaccggtaatcccagaactttgggaggccgaggtgggtggatcacctgaggtcaggagttcgagaccagcctgaccaacatggtgaaacccccctctctaccgaaaatagaaaaattaaccgggcatggtggtggtcatctgtaatcccaggtacttgggaggctgagggaggagaatcgtttgaacctgggaggcggaggttgcagtgagccaagattgtgctactgcactccagcctgggcaataaagcgagactgtctcaaaaataaaaataaaaaataaaagagtataatggattgtttgtaacacaaaagataaatgcttgaggggatggacaccccattttccatgatgggattattatacattgcatgcctgtaccaaaatatcttatgcacttcataaatatattcatctg[142 bp omitted]gaaaccccgtctctactaaaaatacaaaattagctgggcgtggtggcgggcacctgtaatcccagttactcaggaggctgaggtgggtgaatcgcttgagcccgggaggcagaggttgtggtgagctgagatcgtgccattgcactccagcccgggcaacaagagtaaaactctgtccccctccccctcaaaaaaaaatgttgtaaaattatagccaactttacagcagaaattaggtctggcgcagtggctcatgcttgcaatcccagcactttgggaggccgtggcaggcagatcacttgaggtcaggagttcaagaccagcctgaccaacatgtctctactaaaaatataaaaagtagctgggcatggtggcatgtgcctgaaatcctagctacttgggaggctgaggtgggagaatcacttgaacctggaaggcagaggttgcagtgcgccaagattgcgctactgcactccagcctgggcgacagagtgagactgtcttaaaaacaaacaaataaacaactttacagcagaaattagataacagctcgagaaaacggcattcaaaattgaagcttaattaaaattttaatgagagaatttaaaaaaaaaccccaaagggcatggtcttaactaaaataaggggcttagattgaaaggacagaaaggaggctaagggtcaactgggcggggcctcgattctgtgggcgaagattaaatgctaaaaggatttccaggcagaacttggagttgggggtgggtcttggggtctccaagcagcgatttacctggggagaaccaaggtgcagcaggtactccagcgtctctcttaaggtgcccagctcctgctccaggccactgtacgtgtcccaaaccctctctcgctcctcaggttgcataaagggggagacataggttaggtccctctcccaccagatccttccccaccccatcatttgtcagctaaggaggagataagggagtttggtccctggagccctgcaggcgtatggactacaattcccatgggcctctttgcttggactactgggaaccccaaagtctgtatggaacctgcaattccagtacactgctagtgtagacaaataacagcattccctgaatccccaggattacttctgctctctcctaggtagcagagtctacagatctaatgaatttcattagacagttaaaagaccacagcacccagccagacacggtggttcaggcctttaatcccagctatttgggaggccaaggcgggcggatcacttgaggtcaggagttcgagaccaccctggccaacatggtgaaaccccgtccctactaaaaatacaaaaattagccaggaatggtggcgagggcctgtaatcccaggtattcgggaggctgaggcaggaggatcacttgaaccagggagacagaagttgcagtgagcctggatccaggcgctgcactccagcctgagcaacagagcaagaatccgtctcaaaaaaaataaccacagcacccactcaccctggggcagcagaaacttccttgccaataccaacaataacaatgataatatcagctaacacttattgggcactgatcatgtgctaggcattgttctcaactctcatttaattcctatgaggtagttactattattgtctccattttacagataataattatagctgacacttaagtattgctttaccaagtaccaagtaccttaagtgttaaatattcattcattcattcattcattcattcactcattttcacgtatcacatataataattctcagagttacttaaggccgggcgcagtggctcatgcctgtaatcccagcactttgggaggctgaggcaggctgatcacctgaggttaggagttcgagaccagcctggccaacatggcaaaaccccatctctactaaaaatacaaaaattagccaggtgtggtggcacatgcctgtaatcccagttactcaggaggctgaggttgcagtgagctgagatggcaccactgtactccagcctgggcgacagagcaagactctgtcccccccaaaaaaaaaaaaattagagtggttacaagacaatgaggagagagaaaaaataataaaatttggagtgtagacttctgaagaacgatcttcctatgagccctctggggcaggtccccttcgtaacgacttgcatagtcctggggcctcctaggagggcaggccccttcccaggtgctcacctgagtcaagtgacagagggtggccctcacactgaccagccggtcctgcaagaggcgctggcgaccccaggccctcccgggagccccagcctccctggtggcttggcccagctgttgccgggtcaactccagagctgcttctagttgctcctgcaccaagacagaaggtggttagacttcagaagccatgcctagccccaagaagaaagaaaagatgtcctttcacgtcctggacgtccagtcagcatcctgacttccgcattcaggaagggctcagggcaggcagagaggccaggcgccctgtccttggcccagggccccgcaccttctcctcctgcttctggtctatctcctcctgcagcctccgcagaagccggtcctgcccgcacaacttggtcagcagcgtctggagaaaggagagcgggagctactgatggtccagatctggctcttcccctgccgctcctcccatcatctagaacattctctccccaactctgggaactcagcaaggattagatcagtgacaacttacatctgtctccaagctttggtggaaagttgactccaggggaggacccggctgaagagaaggaaaaaagtcaggggtcaaaggggacaggctggtcattcttgtaactcagtgctgagccacgccctgtctctactgataggtactgcactatttatttatttatttatttagagatagggtcttgctctgtcacccaagctggtgtgcagtcgtgcgatcatggttcgctgcaggctcaacctcctgggctcaagcaatcctcccacttcagtctcctgagtagctgggaccacaggcgcacacatcatgcccggctaatttttgtagttttaaaatttttgttgctgttggttttggtagcgatggggttttgccatgttgcccaggctgatctcaaactcctgggctcaagcaatcctcctgcctcggcctcccaaagtgctgggattataggcatgcaccatcatatcatgcctggcctttttttttttttttttttttttttttgagtcaaggtctgtcacccaggctggggtgcagtggcatgatcatggctcactgcagccttgaactcttaggctcaaaggatcctcccacctcagcctcccaagtaggtgggacaacagatgccagccaccggtgccagctaaggttgtttgtttgtttgttttcagggctggggtctcactatgtcacccagaccagtcttgaactcctgatctcaaatgatcctcctgccttggcctcctgaagtcctgggattacaggcatgaaccaccaagcctagcgacccctctccttatcagcttccttctaagcattagcaaatttcagtagaccaacttccacattcttggcttcagaaagatcaataatgggctcttgatcaagcagccatggcaaatattataattaatggagaaatttagacattttatttatgactaagaataaaacaaagtgcagggcacagtgactcactcctgtaatcccaaagctttgggaggccaaagagggaagatcacttgagcccaggagttaaagaccagtctgggcaacatagggagaccttgtgtctgcaaaaaaaataaaaataaaaaaatagggccgggtgcggtggctcatgcctgtaatcccaacactttgggaggccgaggcgggtggatcacctgaggtcaggagttcgagaccagcctgaccaacatggtgataccctgtctctactaaaaatacaaaacttagccaggcgtagtgacgggcgcctgtaatcccagctacttgggaggctgaggaagaagaatcacttgaacccgggaggcagaggttgcagcgagccgagatcgtgccattgcactccagcccgggtgacagagtgagatttcgtctcaaataaataaataaataaataaataaataaataaaataagctgagcatggtggtacatgcctgtagtctcagctactagggaggctgaggtgggagtatcgcttgggcccaggagactgaggctgcagtgagccatgattgcaccactgcactccagcctgggtgacagagtgagactctgtctcaagaaaataaataattttttttaatttaaaaaaaaacaaaaaacagcctgggtaacatggcaaaaccctgtctctacaaaaagtagaaaaagttagctaggtggccaggcgcagtggctcatgcctgtaatcccagcattttgggaggccgaggcaggcagatcacctgaggtcgggagttcaagaccagcctgaccaacatggagaaaccctgtctttactaaaaatacaaaattagcagggcgtggtggtgggtgcctgtaatcccagctactcgggcagctgaggcaggagaatcgcttgaacccaggaggggaggttgcggtgagccgagatcacgccattgcactccagcctgggcaacaagagtgaaactccttctcaaaaaaaaaaaagaaaaaggaaggaaagaaggaaagaaagaaagagagagaaaaaggaaaggaaaggaaagaacgaggaggggagggg[359 bp omitted]gaggcaggagaattgc[263 bp omitted]caaaaaaaaaaaaaaaaaagaaagaaagaaagaaaagaaaagaaaaagaaagagaaagaaagaaagaaagaggtttttgcggatttaagttaagttacgacgatgtcatggggtgtcctaataggaggagatggacagcaacaaaaacacaaaggaagatcatcatgggatgatggaggcaaagatgtggccataaaaaaaaccacagaacctcaggaattgctggcaaccaccagaagctaagagagagtcaataaaagctcctccttagaaccttcagtggaagtatagccctgccaatcccttgactccaggcctctggcctccagaaccgcaagataatccatttctgttgttttcggccatgcgctttgttacagccaccacatgaatctaatacctacccagggtctttgaaatatctacagttctctaggcaccctaggccaagagatgacattcctcatagagaagaaaggaagggagggggctccggtagatttagggtactccaggatacctaccaataaaaccatggaggcccgggtcccagggggccgcggggggagctggagataagtgggggagccagagtgtgcctgggaggaacgttgaaatggagatgtttagaaactggcatgtctgggagacttttcattttgttctgtactaagaaaaattcttctgccttgggatcctgttgatctatgaccttacccccaaccctgtgctctctgaaacatgtgctgtgtccactcagggttaaatggattaagggcagtgcaagatgtgctttgttaaacagatgcttgaaggcagcatgctcgttaagagtcatcaccactccctaatctcaagtacccagggacacaaacactgcggaaggccgcagggtcctctgcctaggaaaaccagagacctttgttcacttgtttatctgctgaccttccctccactattgtcctatgaccctgccaaatccccctctgcgagaaacacccaagaatgatcaataaaaaaataataataataattaaaaaaaaaaagaaactggcatgtcttagtgacaaatagtagagtgggcatgtccataattgaagtgctttaggagatattttgaggttcagaactgggccctctcaacttcctcaactacctgctctccagctgtgtgccactgtggggacacagagggtgataataaatgcaccagcctggcaaaacagccccacaagatgatggaatttgctactctcattctcagacttgcagtcagctgtggatattctgagctaccgtcccatgatgctcagacaaaacagcaggcaaccaacttgcaaggtgaactggggacacaagggagatgcaaacctctcaccgcactgtcttggcacagagta[139 bp omitted]gtcaacatggtgaaacctcatctctaccaaaaatataaaaatcagccggacgtggtggcaggtgcctgtaatcctagctactcgggaggctgaggcaggagaatcgcttgaacccgggagacagaggttgtagtgagccgagatcgtgccactgccctctaaccttggcgacagagcaagacctcagtctcaaaaaaaaaaaaaaaaagcaatggccgaagaccagcctagaaagacagcccagacacctgagaggagctggacacctgataggttcaagctctctctcacctgagcccagctgagatcattatggactacaatacccatgacacccagggagcaatggccttgagaatacggaaagacagccctgaggcctgatgggaaacgtagtcccctccttctcacctctctgctcacctgtgttctgggctcctgactccagtgctggggactcctggggggctttcctcccccagcctcagagggaggtcctcggcggggagtagggggtcgggagagggtctggcgttgggggccccaatccagaggaggtcggacatcaatgcgactcaacggggtgtgaggtcgggcagggggtgctgtgtctcctgagggggcagggggtcgccgcgcaggggcagaacggggacgggggaggctcagaggcgagggagggcgagagaggggggtgaacaggctgtgggaaggagagaatcggggaactgagtcaactagagccctctccatccacctccttacccatcaagtcagcctcaaggacatgtctcacttcactgtgtcttactgtcccactgggttagaatcctcctctactgtccaaatcctcagtaatgtccgctttgtggcatcttcccctccagtcttctccccgacaggctgtgacccccacgggagccccagcaagtcacacacactcaagcagaaagcgctaaggcccgcccccaaccagtttccggccctgcccttctcttaggccacgcccacaaccatgtcctccctactcactcggggctcctcgccctccgcatctggagtccagagtggaggtcggttgtggggctgggagtgagcagcctgggtctaccacgacctctggagagtcgagtcacttccggtgattctgagatgcgcccctcttcccctctgctcacctccgggggaccaccggggccgccggggccctccccgggctggggtcgtgcaggtgacctgggttgcccactagcgagtggacatagacaagatatcactccttcgaacttcataacagccctattctcttgtcacaggtgagaacacaaggatgcacccaaaaaaggaaagttgtgcactataaatcatcgtcccccttcttcagaaggggaaactgaggcctccaatgtgaaactgacctgtgcgccaggccacaacgtctatccaggttgctggacccaatgccccggaatatgggatagactcagccaggtagtccagtttccagcctgataattggcgcaggccatgtcagagcctaagagatagtctgacatttttttaaaatctgatactatcttttacctggcattgtttaggtggcagctcaggggacttcagaaggagccaatcagagagtgtgcaatattgatcattcctggagcagagctgagtgcgtgactgaagggtcagcttgggggcggggacggacaaggtggtgggcggaacttaagggagaaagacttttgctgattggaaaagttccctggaggtggggcctagaagacgaggcgccttagctagaagactggtgattggacactcaagggggcagggccccaaaggggaggagttgggatgacgagactgactcagggtggagggtcaggagcatggcttggacctctactcactagtcgtccccctccgcacgggaggcccggcccagcgcccgtagccagccccgcaggtcttctaaggtgtcagcggccaaaacgtaggtcctcatgcccgggtgctctgcctgcgggaagagaaggcttggaatccggactcccgggccttgtaaaaaggaggacaggccggaccggtgactcattccagtaaacccagtgctttgggaggccgatgcgggaggatggcttgagaccagcctaggcaacataatgagacacccccctccacctccttccgcccccgtctctacaaaaaaatcaaaaaattagccggacgtggtggagcgcacctgtagtcccagctaccggggagactgaggcaggaagactgcactttgcgtcgctgcacgccagcctgggtgacagagcaagaccgtcaagaaagaaaggaaagagggaaagagggaagggaagggagagaaagaaagagagaaagagaaagaaagaaagagagagagagaaaaaaaaaggaaaggaaaggaaaaaggaaaggaaaggaaaggaaaatggaaaggaaaggaaaggaaaggactggacagacgcggtggctcatgcctgtaatcccagcactttgggaggctgaggtaggcggatcacctgaggccaggagtttgagaccagcctggccaacatggcgaaaccccatctctactaaaaatacaaaaaattagccaggcgtggtggcgtgcgcctgtaatcccagctactccagaggctgaggcaggagaatccgttgaacccaggaggcggaggttgcagtgagccgagatcgcaccactgcactccagcctgggtgacagagagagactctgtctcaaaaaacaacaaaacaaaaaaacaaaccaaaacaaaacaaaacgaggatgcaattgacgcttgtcaagaccttttatctccagtaatggatattccagtgcttgttaggacttggagtttcctcgacagatatctacccgccctcatctccagttcccatcgcctggtgcacaacatggatggatggactcacggtgaaggtgaagcgccgccctcggggggctcccggcccatctggtctaatattgtagctggggagcaggacgctgcctaggacactctcctcgcggctgtctgcaaagaggggctggggtcaaggatcacacagggatcagaaggccaagatgctagagagaagggcagactgggcgggggggccctcccaccccaagccagccagccagccactgacccttgtaataaaagaggcaatggccggagaggacgaaccagcggcgtttccagagacggagccccgagctgtcctggggagagagatgggaggaggggcctgagtaaagggaaacagaaaaaggggatgaaggcagtgacgatggggacagagagccagagagagaaagaaacttggagagaggagaacagagacataaagtagggatcaagagagtggggtgaggccgagcacaatggctcacgcctgtaatcccagcacttagagaggccaaggcaggtggatcactcaattccaggagtttgagaccagcttgggtaacatggcgaaaccccatctctactactaaaaaaaaaaattagccaggtgtggtggcgcgtgcctgtagccccagctactccggaggctgaggagggaggatcacttgagcctgggagtggggtggaggcacaggagaaagacccagagagacagaagagacagagacacatgtttggggcaatggagtggataagaaggagagctggaagccctctgaacatgatagaatagaatagtagccctacttcttttcttttctctctcttttttttttttttttgacagagtcttgctctgtagcttaagctggagagcagtggcatgatctcggctcacggcaacctctgcctcccaggttcaaatgattctcctgcctcagcctcccgagtaactgggattacaggcacgcaccaccacacccagctaatttttgtatttttagtagagacagggtttcactatgttggccaggctggtcttgaactcctgacctcaaatgatctacccacctcggcctcccaaagtgctggggttacaggcgtgagccactgcgtctggcctcccccactttctttttttgttttttgagatggactctcgctctgttgcccaggctggagtgcagtggcacgatctcagctcactgcaagctccgcctcccgggttcacgccattctcctgccccagcctc[226 bp omitted]tccaccttcatgttttctcgtctatccgctggagattgagaagttttagggaggtttggatgagacatggaccacatatgggcagactttagctgcagagacttagtccaattattctggagcctgagacacagagaggccaggaaggtggcaatgagccatgacccaaatgcagcgtctccacctgcctgaactactcatcgcctctgcctgaactactccactaactatctccaacctcgtgtgcctcttctcctcaacccattcccatagaagcccacatgatcttttaaaattataagttagatcacgtgagtccccttttcaaaacagagaattaagaacacttgaaattcagtctcaaattccttaccatcacttactgttttttgtttgtttgttttgttttgttttgagatggagtctcgctctgtcacccaggctggagtgcagtggcacaatctcggctgactgcaatctctgcctcccgggttcaagcgattctcctggctcagcctcctgagtagctgggactacaggtgcctgccaccatgcaggctaatttaggttttttgtttttttttttttttgagacggagtcttcgctctgtcacccaggctggagtgcagtggcatgatcttggctcgctgcaagctccacctcctgggttcacgccattctcctacctcagcctcccaagtagctgggactgcaggcgaccaccaccacgcccg[131 bp omitted]caccacgcccagcctaatttttgtatttttagtagagatggggtttcaccatattggccaggcttgtctcgaactcttgaccttgtgatccacctgcctcgacctcccgaagtgctgggattacaggcgtcagccatcgtgcccagcccatgtactgctttgcagagagttttgagtttgaaggtgcataagaatcaccaggaaggtgtgttaaaacacagattctggggccccatccccagagttcctgatttggcaaatctatgatggtacctcatcatttgcctttctagcaagtccccagatgacgctgatgctgctggtctgggaccacactttgagaaccactgctctgctgctcctcctggcttcttcccctggcctcacttgacaccaaggttttgcctgctgcagaccttttccttttggatgcgatctgcctccaggtcttttttttttttttgacatggagtctcactccatcatccaggctggagtgcaatggcgcaacctcggctcactgcaacctccacctcccagattcaaattttccttgtctcagcctcccaagtagttgggattacaggcacccccaagctggcccggctaatttttgtattttttagtagagccagggtttcgccatgttgaccaggctggtcttgaactcctgacctcaggtgatccgcccgcctcagcctcccaaagcgtttgaattaccggcatgacccactatgctcagccagctcaaatgtcacctcagagataattttccctgaccaaatgtcaaattgaagttctcctctctcagccacgttcaagcacatcatattccgtttttttgtttttgtttttgagacagggtctcactctgtcacccaggctggtgtgcagtgacatgaacacagttcactgcagcctcagcctcctgggcttcagcaatcctcctgccttagcctcccgagtagctgggactataggcgcacaccaccacgctcagctaggttttgtgtgtgtgtgtatttgttgttgagatgaggtttcttcatgttgcccaggctggtctagaattcctaagctcaagcgatcttcccgtcttggcctcccaaaatgctggggttacaccactgaacctggaccctatgttacttcttcatagcccatcctgcgatctgaaatgaccaagtccatttatttatttactaatttattatccacccatgctccacccaatctggaatgtaatataaatacttttgtgttatttgcatggtgtgtgccctgggattgggaacactgtaagtgttcaagaagtagtcaagaaagaatgaatgaatgggccaggcacggtggctcacgcctgtaatcccagcattttagggagccgaggcgggtggatcacttgaggtcgggagtttcagaccgccctggccaacatgataaaaccccatctctactaaaaatacaaatattagctaggcatgatggtgcatgcctgtaagcccagctactcgggaggctgaggcacgagaattgcttgaactggaggccagaggttgcattgagccgagatcataccactgccctccagcctgggcgacagaaagagactctgtcttaaaaataaataaataaacaaacaaacaaacaatgacggactaaggggaggggcagtgatagcaagaaaaagaaagcctatttggggacttgcaaggagagagacagaggacagccggggcacagacttcagtgtccttttccttctcctactgaccccacctgcttatgaagccagcctcggatgtgcacgggaaggttgggatccctcctgagcgcattgcctctcttcccaaaggcgtggatcttgtttactgcccgggtgggcttctgaggagagaaggggacagaagtgaacagggagagcctaggatggtcctgggagggggtgagggtggacacaggcaaccgtaggctctcgcttggctgccctgagaaatgggtcaaggaccag[180 bp omitted]gaggcaggagaatggcgagaacccgggaggaggagcttgcagtgagccgagatcgcaccactgcactccagcccgggagacagagtgagactccgtctcaaagaaaaaaaaaaaaagaaagaaagaaaagggtcaaggtgggggctgaagttggagatcagaattgggaggtgttcttattgcagagttaagagactcttttttttttgacaggctctttggagtgcagtagcctaaacactgcagcctttacctcctggactcaggtgatcctccagcctcagcctcccatgtagctgggaccacaggcatgtcccaccatgcccagctaatttttttactttttgtaggggacgggggtctcactttgttgcccaggctgggagagactctttttttctttttcttttgagacagagtctcgctctgtcccccaggctggagcacactggcaccatcttggctcactgcaacccctgcctctcgggttcaagtgattctcctgcctcagcctcctgagtagctgagattgcaggcacgtgccaccacgcctggctaatttttgtatttttagcagagacgcggtttcgccatgtcagtcaggctgctcttgaactcctgacctcaggtgatccacccgcctcagcctcttaaagtgctgggattataggcgtgagccactgcgccgggccgagactctttttttgatgggcagagggaggtgttcagaggcaaggaagaggctgtagggaagcaatttggggatcaagcatccactgccaagaagcagatgcccttggccaccagagccagagctgtagtaggtcctttgggatctgaactgggactatgggctgggagggccccataatcagggggaactctcacgctgagtctccagtgaatcaaaggatgccctggtgccctgcggtcacaccccttagcaaccaagtacaaggagaggaagcctcaaatccctccatcctgcccggatggagcctcatctcctgatgcccacagatatctcaggcatccttagccaggtcccgacaatatgcccttccttggaagcggtggtactgaccaaggctgagatcagatctctgggctctgaacttgagaaacaatatgtgtggaacggcaggaggaaaaagaaatgagtgtctccctaagcttttggctgggatgccgatttgggatgcaagtatctggaggccccttgggtcttattgtcagagaagggtctctccttataggatttcattagtgggtagattggatggcgagagataggacagcaagttctggcactaatcaagagcagccactacttctcagaactcgaggggcctcatggctggggagcggctttatcttagcaaccagggtcaagggaggttgttactctggtttagaattaggaaaatacaaagggtggggacagagctgggagtgcctctgaattcctagctgcggtgtgtaggcaatttgggaccttactatgtctggcagaccccgttgctaaggatctttgtccttaacaaccagagtccttggggaaacagaaggatgggcggcccagagccccaccttcctccccatccccgccaggaagctcaaaccttggggctcaggctgctgagcgaggagatggtggaggcgctgctggccaggctcaggctgctgcgaggtcggctcccctccatcaagggctgggggagagaaagaaaggggctgtgtctctgcagtgacgggtgtgagacagagatggggtcaggggcttggaggtcggaggaggctgcagagaaagagcctgttgtttcgggacttggggggctgggggaggccatggcccgtgaccacataccaagagtggtgccaagagaggtaggcggccctggcagctgcgggagggggcagctgtctgcagcccaggccagagaataggggcttctttattcctgcccactgcactcaggccaggaatttgaccctctctgtgcttagggactccccattccctgcctccttccggctgccccaggctacctgtctcccgccctcccacatgcacccccaaaccacccctgccaactccccaagccaagccctgcggcaccaggaatgtgaacccagagagcccctcccagcccagccagggaacttacccagctctggggtcccagtgacgggggggcaagaggacggtgtgggtgctgcggcacctaggcagtctcccgcctcctttgtctcttagctgctgtctctcatagttctcaatctctctcctcacctgctcactcacactttttgtctctttgtctcctgtctcttacggtctctctctctctctcttccttttacactacctctctccccactctcactttctgtgtctccctctgatctctgtctcttccagtctctctctcactcattctctccctctctctctctctccaatctttctgtttctgtccaaatcttttattgtcagactcacagggtctcttccttaagtctctgtctcattctctctctctctctctctctgtctctcagtcatcccctgtgtcctctctccttcacactcagtctcttcctctttctctctggctctgccgtttcctcccttttctctttccgatttcccttctcactttctcccttcctccctctcccagtttctctttcctctctgctggtctttccctgcctctgccagccgcccacgctgctgttctcccctcccaatcccggctgtccccgccccttctggcctccccactacagcctgacctctggctcagctgcccccatagctgaagggaggggcttgggccccccaattcccaggtcccctaaggaccaaggttgggacttctcagtgtttggagagttggacttgaggcctgcactccagggcccccgtgggtttgctgctgtggttgggggcctgagccactggtgtcctaaacggaggaggcttgtgtcctgcaaggggtggggactcaaatttccaaagccctggagggaatgggttagggatccagactcctgggtgcccgagaaggtctgagctaggatcaggactcctgagtcgtgaaagagctgggggtctggaaacatggctgtgcttggaaggggccagggacggtttgtccaggtcccctagggagaaaaggggatggtcccagtagggcagggtgaaatggagagttccaaacctccacctcagatccaggtgagaattctcttctagactgaggacaactccctcaggagagagacatgattccttggtatattttgaggaacaagattatgcatccgtaggcaggggaggagagcggggggctggaactgtcacccagggcctggaacttgtagcagaagcgcccccacccgcacaaagagtgccacccaggcagaatcgcggcttgtgggggcagagctactgcctaagtctgaagcagatgacacccaggagtggagccttgtgcctgtgaccgggaaggaatctgagctttcggtttaactgccattcaccatgcacctgttgagcacctactgtgtgcaggcac[136 bp omitted]atagcgagaccttgtctctatttagaaaatgaatttcttttttttttttttttgaggcggtgttttgctctgtcgccaggctggagtgcagtggcgtgatctcggctcactgcaacctccgcctcccgggttcaagcgattctcctgactcagcctcctgagtagctggaactacaggcacatgccactgcacccggcctaaattaattattattattatttttttgagacggagtctcgctctgtcgcccaggctggagtacagtggcacgatctcagctcactgcaagctctgcctcccaggttcacgccattctcctgcctcagcctcccgagtagctgggactacaggtgcccaccaccacgcccggctaatttattttgtatttttagtggaggcggggtttcaccgtgttagccaggatggtcttgatctcctgacctcatgatccacctgcctcagcgtcccaaagtgctaggattacaggcgtgagccaccgcgctcagcctaattacttttttttgaaaagcattgagcccagcaaagtgcctgatctcatagtgcttacatcctcattctcatttgcaaggaatctggaccctgctgtgactatcttggtcaagtggcttcatttccaagcctgtttccccatctgtgaaatgggaacaatgacaccctcgcactcggggaggaaaccaaccacatgtgaaaataggagactctagccaggcgtggtggcaagctcctgtactcccaactactcaggaggctgaggcaggagaattgcttgaacccgggaggcggaggttgcagtgagccaagatcatgccattgcactccagcctgggtgacagagtgagacaccgtctcaaaaaaaaaaaaaaaaaaagaaagaaaaagaaaaaagaaagaaaagaaaaaaaaaagaaaatgggagactctaggctggggcctgtgggctaaattggggtaggaggccaggcacagtggatcacaactgtaattccagcactttgggaagccaaggcgggcagatcacct[143 bp omitted]tctactaagaatacaaaaaaaattagccgggcgtggtggtgggcacctgtagtcccagctactagggaggctgaggcaggagaatggcgagaaccagggaggaggagcttgcagtgagccaagatcgtgccactgcactccagcctgggcgacagagcaagactccgtctcaaaaaaaaaaaaaaaaaaaaagacctgcctggtcaacatggcgaaacactgtctctactaaaaatacaaaaattacccaggcattgtggcacatgcctgtaatcccagctactccagaggctcaggcaggagaatcgctggaacccaggaggtggaggttgcagtgaaccgagatggcgccactgaactccagcctgggcgacagagtgagacgcctactcaaaaaataaataggctgggtgcagtagctcacgcctataatcctaacactttgggaagccgaggcaggcagactgcctgagctcaggagttcgagaacagcctgggcaacatggcgaaacactgtctctactaaaaatacaaaaaattagctgagtgtggtagtgcgtgcctgtaatcccagctactcggaggctgaagagggagaatcgcttgaacccggaagatggaggttgcagtgagccgagatcacgccattgcactccagcctcggtgacagagcgagactccatctcaaaaaaaaataaaaaaataaaaaataacaaataaataaataggcctggagtggtggctcacgcctgcaatcccagcactttgggaggccaaggcaggcagaacacctgaggtcaggagttcgagaccagcctagcaaacatggtgaaatcccgtctca[133 bp omitted]atggagaaactacgtctctactaaacaaatacaaaattagccgggcgtggcggcacatgcctgcaatcccagcactttgggaggccaaggcgggaggatcccctgacgtcgggagttccagaccagcctgaccaacatggagaaactacgtctctactaaacaaatacaaaattagccgggcgtggcggcacatgcctgcaatcccagatactcgggatgctgaggcaggagaatcgcttgaaccccgaaggcggaggttgcggtgagccgagatcgcccctttgcattccagcctgagcaacaagagcaaaactccgcctcaaaataactaactaaataaataaataaattggggtgggaaggcattgaccctgagctgagagagaactggctcgctgttgaagcagggccacgcatttgattgacagttcgtttgttggaggggcgtggtcacgctcggaaactccgccgtgacgttgcaaaagctggaatctccgcgagaagtcctgtcttacttccacttcccacccttcgggttgcggtctcgaaaccccgcctctcttcgtgacgtcagcacgccgggcgcggtaggctataaaagcctagtggccattgtgttcgttgctcttatcggttcccatcccagttgttgatcttatgcaagacgctgcacgaccccgcgcccgcttgtcgccacggcacttgaggcagccggagatactctgagttactcggagcccgacgcctgagggtgagatgaacgcgctggcctccctaaccgtccggacctgtgatcgcttctggcagaccgaaccggcgctcctgcccccggggtgacgcgcagctcccagccggtgagtaaggggtcggaacgcctgggtccccacggggctgggggcccggatttagaaaggagaaggggttgggagcctggagtcctgagcctgagggaggagggatctggaagccagattcttgggtcccccgtgaaggaatcatctgccaagtagggggtcgggtcagaatgtttcagtctgcgagggaggagggtgtgagggtttgatttgtcaatcttcagcagaatgagagagctagggactatgactttgtcgccaagggaagcaagtaaagacttttgttcttggttcttgggactgggagttctgcgtctgaagaaagagagggctgggggcttggacccttggatctaaggcagaactaggggctcagactcctggctattgagagataagaacagagccaagggacagagatgggcgtggccgagatcagaaaggaatttgggactctcgcgttgctatttacaatagttgtgttactatttccgttgctatgactcatagtcacgcccggatgccatcctctaaatggcccctaaactttatttttttctcccccttttccagcccagacacatggccccaggccaagcaccccatcaggctaccccgtggagggatgcccaccctttcttcctcctgtccccagtgatgggcctcctcagccgcgcctggagccgcctgaggggcctgggacctctagagccctggctggtggaagcagtaaaaggagcagctctggtagaagctggcctggagggagaagctaggactcctctggcaatcccccataccccttggggcagacgccctgaagaggaggctgaagacagtggaggccctggagaggacagagaaacactggggctgaaaaccagcagttcccttcctgaagcctggggacttttggatgatgatgatggcatgtatggtgagcgagaggcaaccagtgtccctagagggcagggaagtcaatttgcagatggccagcgtgctcccctgtctcccagccttctgataaggacactgcaaggttctgataagaacccaggggaggagaaagccgaggaagagggagttgctgaagaggagggagttaacaagttctcttatccaccatcacaccgggagtgttgtccagccgtggaggaggaggacgatgaagaagctgtaaagaaagaagctcacagaacctctacttctgccttgtctccaggatccaagcccagcacttgggtgtcttgcccaggggaggaagagaatcaagccacggaggataaaagaacagaaagaagtaaaggagccaggaagacctccgtgtccccccgatcttcaggctccgaccccaggtcctgggagtatcgttcaggagaggcgtccgaggagaaggaggaaaaggcacacaaagaaactgggaaaggagaagctgccccagggccgcaatcctcagccccagcccagaggccccagctcaagtcctggtggtgccaacccagtgatgaagaggagggtgaggtcaaggctttgggggcagctgagaaggatggagaagctgagtgtcctccctgcatccccccaccaagtgccttcctgaaggcctgggtgtattggccaggagaggacacagaggaagaggaagatgaggaagaagatgaggacagtgactctggatcagatgaggaagagggagaagctgaggcttcctcttccactcctgctacaggtgtcttcttgaagtcctgggtctatcagccaggagaggacacagaggaggaggaagatgaggacagtgatacaggatcagccgaggatgaaagagaagctgagacttctgcttccacaccccctgcaagtgctttcttgaaggcctgggtgtatcggccaggagaggacacggaggaggaggaagatgaggatgtggatagtgaggataaggaagatgattcagaagcagccttgggagaagctgagtcagacccacatccctcccacccggaccagagggcccacttcaggggctggggatatcgacctggaaaagagacagaggaagaggaagctgctgaggactggggagaagctgagccctgccccttccgagtggccatctatgtacctggagagaagccaccgcctccctgggctcctcctaggctgcccctccgactgcaaaggcggctcaagcgcccagaaacccctactcatgatccggaccctgagactcccctaaaggccagaaaggtaggtgctgagagcccagattctattttttttttttttttaattgagttggagtcttgggctgtcacccaggctggagtgcagcggcatgatcttggctcactgccaacctctgccgcccaagttcaggcgattctcgtgcctcagcctccagagtatctgggattacaggcgcatgacaccacacccagctaattttttttgtatttttagtagagacgggggttttgccatg[133 bp omitted]gctgggggccgagacttctgggtccctgtatgttgcagagggttgcatgtcatctccatggagaaggctgtgtacgctgtcacgcaatcccttgtaagaggccaggcccctgggggaggagggagcagctgtggctcacagcagccccaggaaaccacctcttccttcagtgagtcagatagatagagaatcccgtgacagtgacaggcaagtgactagccagatagaaagcatttttgtgtaataactaatttttgtttgcttctctctctctcttccccgccctccccatccggattcccgtggctgtgtgcatctcctgcctgtgtccccatgtctgcccgcaggtgcgcttctccgagaaggtcactgtccatttcctggctgtctgggcagggccggcccaggccgcccgccagggcccctgggagcagcttgctcgggatcgcagccgcttcgcacgccgcatcacccaggcccaggaggagctgagcccctgcctcacccctgctgcccgggccagagcctgggcacgcctcaggaacccacctttagcccccatccctgccctcacccagaccttgccttcctcctctgtcccttcgtccccagtccagaccacgcccttgagccaagctgtggccacaccttcccgctcgtctgctgctgcagcggctgccctggacctcagtgggaggcgtggctgagaccaactggtttgcctataatttattaactatttattttttctaagtgtgggtttatataaggaataaagccttttgatttgtagcgagcagcgtctgtatgtgtcagaaactgacagcattctacttacaggtccctgagggagctgggaagagaatagcataaaacaaagcacttcaatggcggataaaccgcttttcctcaaatttgctaccactcatcctgaggcttcttttgaacctaacagtgcagggaccagccccacagggtcggtgggcttctccctgtgtgcggcgacgagagagtgtagaaataaagatacaagacaaagagataaaagaaaagacagctgggcccgggggattactaccaccaatgcgcggagaccagtagtggccccgaatgtctggctgcgctgatatttactggatacaaagcaaaaggggcagggtaaggagtgtgagtcatctccaatgattgataaggtcacacgagtcacgtttccaccggacagggggcccctccctgtttggcagcccaggtggagagagagaggagacagcttatgccattatttctgcatttcagagacttttagtacttttactgattttgctactgctatctagagggcagagccaggtgcacagagtggaacaggaaagtgaaacaggagcgtgaccgctgaagcacagcatcacagggagccggttaggcctccggataactgtgggccagcttgactaatgtcaggccctccacaagaggtagaggagcagagtcttctctaaactcccgcagggaaagggagactccctttcctggtccgctaagtagcgggtgtttttccttgacactgaggctaccgctagaccatggtccacttggcaacgggcgtcttcccagatgctggcgttaccgctagaccaaggagcccttctgctggccctgtccgggcataacagaagcctcgcactcttgtcttgtggtcacttctcactatgtctcctcagctcctatctctgtatggcctggtttttcctaggttatgattatagagcgaggattattataatattgggataaagagtaattgctacaaactaatgattaatgatattcatatataatcatatctaagatctatatctggtataattattcttgttttatattttattatactggaacagctcatgtcctcggtctcttgcctcggcacctgggtgtcttgccgcccacataacagctggtgggttttatagttttttttgttgctttttttgagactgagtctcgctctgttgcccaggctgaagtgcagtggtgcaatctcagctcaccacaacctctgcctcccaggttcaagtgattctcctgcttcagcctcccgagtagctgggactagaggtgtgcgccaccacgcctggctaatttttgtatttttagtagagacagggtttcactatgttggccaggctggtctcaaactcctgaccttgtgatccacctgccttggcctcccaaaatgctgagataacaggcgtgagccaatgcacccggcctatgtatttttgtttgtttgtttgagatggagtctcgctgtgtcacccaggctggaatgcggtggcacgatctctgcttactgcaacctccgcctcctgggttcaagcgattctcctgtctt[226 bp omitted]ttgggacaattatcaccacccccccaagggagctggagaattgagtcacggatccctaaaaggaggcagaattgtctgtgccttgctggaccattaaggctcaatctctacaggcctttacattctcctccgttgctttgataccagtgggtatcgaggtccccaagcccgggtgggacctccccctcagccagtgttcaggctcttgacacagtcatgaaaatgaattcaaggacgagttggaaaagagtgaaaatacaggatttattgcaaaggggaaagtccacactcatgaaaggggactcgagagaatcacgtgcaaggggggttgaggctgctaccgttatgggttttttgtttgtttgtttgttttttaaagatggagtcttgttctgtccagcccaggctggagtgtagtgacacgatctcagctcactgcaacctccacctcctgggttcaaacaattctcctaccttagcttcccaagcagctgggactgcaggcgccaccacacctggctaattttttgtatttttagtagagacagggtttctccatgttggccaggctggtctcaaagtcctgacctcaagtgatccacctgcctcagcctctcaaagtgctgggattacagacgtgagccaccacgctggccctttttggatttttttaaccaaggggtaaaatactcatgagcattcctggaaaaagatggagatttctcagaactgtggtgccacccatctttacaccaaatatgggtgttcctgggaccgtcatgatgctggtgggtgtgtgactgtgttgatgaacatataatgaggtcctacgtgaaaccgaggtcagacccagtgccatattgggtctagtcggacttagcctacttggcccacgccctggtttttcaggatcttatcagcccatagcttctgtagctatttcaagtttcctgttgctggtctggtcttgtgaaactgctgcctggaattttctaatctcctgcaaccaccctgtatgattgctgttgcagcctgattttacatttataagccctgtgtccataggcctagtttccttatctgtaagctgactaacaattgtacatatcttatgggattgtaaggccccaaaggagttaaaacaatgctcatgaaataaatgctataatacggtaattattctatataccgttattcttttttttttttttttttttttcctgatacggagtctcactctgctgcccaggctggggtgcagtggtgggctctcggctcactgcaacctccacttcccaggttaaaacaattctcctggatcagcctcccaagaagctgggactacaggtgtgcgccaccacttccagctaattttttttttttttatggagtttcactcttgttacacaggctggagtgcaatggcacgatctcagcacaccagcaacctccgcctcctgggttcaagcgattctcctgcctcagcctcctgagcagttgggattacaggcgtgagccatcacgcccagctaagttttgtatttttagtagagaaggagtttcaccatgttggtggtcaggagtttgagactcctgacctcatgatccgcccacctcagtctcccaaaatgctgggattatgggcatgagccactatgcccacctctacctctaatttttaatttttttttttttttttgagaccgagtctctctgtgtcacccaggctggagtgcagtggcgtgatctcggctcactacaaccccctgggttcaagcaattctcctgcctcggcctccctagtacctgggattatatgcgtgcgctaccacgcagggctaatttttgtattaatctacctctagaccttcacagaatgcaggctcctctcatcctcctaacctaatggcctttcattagctttacaaaagcagcttagttaaactagaaatcctagcactttgggtggccgaggtagatggatcacttgaggtcaggtttttgtttgtttgtttgttttgtttgtttattttgaggcagagtcttgctctgtcgcccaggctggagtgcaatggcaggatcttggctccctgcaacctccgcctcccgagttcaagtgattctcctgcctc[133 bp omitted]ctcctgccatataatcctttcatttccccaaggcaaccaagcctaattccacctaattaaaaacctttgtatgagtgctacctgctgcctgaggatcccaaccctgaggcctcttgctcagctagttgctcctgattcttcagatgtagtgtgaaaattcctttttttggtggggggatagagtcgcattctgttgcccaggctggagtgcagtggcacgatcgggtcactgcaacctccgcttcccagattcaagcaattctcgtgcctcggccaccggagtagctgggattacaggcatgcgccaccatgcccagctaatttttgtatttttagtagagacggggtttgccatatcggcgaggctggtctcgaactcctgacctcaagtgatccttccgcc[134 bp omitted]gattcaagtgtttcttctgcctcagtctcctgaatagctgggattacaggtgcctgccaccacgcccagctaatttttgtacttttagtagagacggggtttcacatgttggccaggctggtctcgatctcctgacttcaggtgatgcaccagcttcagcctgccaaagtgttgggattacaggcgtgagccaccttgcccggtcagtgttggttattaaggtggtgcaaaagaaggcatgtcggggcccttcctccaaatgaggaggcacagaagctggcaagggtatggtattttattgagttattcaacagccagcttctaattgaaactggacaagcagatgctgaaggcctggagcgggctaaatggaaagcagaagtccatggtgaatgtgtctgggcccactcggccgaactggagcaccagatgttcttctgagaagtgaatcaggaacaaagccttagcctgactctctcatctcccagcttcgagaactgagactttttttttttttttttcttttttttttttttttgagacagagtcttgctctgtcgcccaggctggagtgcagtgacctgatcttggctcactgcaacctccacctcccaggttcaagcagttcttctgcctcagcctcccaagtagctaggattacaggcatgtgccaccacgtccggctaatttttttttttttttttttttttgagatggagtctcgctctgttgcccaggctggagagcagtggcgcgatctcggctcactgcaagctccgcctcccgggttcacaccattctcctgcctcagcctcctgattagctgggactacaggtgaccaccactacacccagctaattttttctgtgtttttagtagagacgg[135 bp omitted]tttcaccatgttggccaggctgttcttgaactcctgacctcagatgatccacccacctcggtctcccaaagtgctaggattataagcgggagctaccgcgccaggccgagaatggagacttttaagaggctgagcggtgcccttactaagccagaaaccctgagggtgtgtaaactacaattcccaataggctttgcaatagggtggcatctgccctgcctagaaaaacgctcaagtgatgatgggagatgtagttcccttccgttcacaccctaacccccaccccacctggcccggctaaactggtttccaggagctcacggtgtttgggatccacgatttggaagttcttcaccgaagcccgagtgactcgaccatggaaattgagcgtgtagacaccgttctccttgtcccacgacggggttttgttgtgcaacaaaagcaacccttgtttgtccccacgttggtaacgactcagtagcgactcctgttcctagaaggtaaagaaggggctgtggttttctcagaggctttcgaaactccatcttgaacaggggcgactccatcttgaacaggggcgactccatcttgaacaggggctgggtaaaatgaggatgagacctgctgggctgcgttcccaggaggttaggcattcttagtcacaggatgagacaggagtttgacaggactggtatcacaatgttagaaatgcttgttccccggtgcagtaaagaaatagcacttgagcataaatttaatttcctcagcaaggccattttttaactttctgcagaaagggtacactcaccaggagttttgccatgagagtacactgaacaaaggagacagggtcatttataacctggcgcatccaccctactgccgtgtagggtttccattggctggaacgggacctcacgttctgtatttgtcccaattggctagcaacttagaactttttaaaagagggaaaagcagaagaatacaaagtaaggaggaagtaacttgtggaatgttgagaaaggtaaaaacaccttcaaataaggaagaggaacaggctatgacctaatgcttgcttggaccggtacaagcatgccagggcaaatatttagggtaaattgtgggagctaaaaacgtaaagtacactgatttctttattatggctaacagatatttaagaatgtta[181 bp omitted]gcatggtagcgggcgcctgtagtcccagctactcaggaggc[137 bp omitted]gaagcaggaaccctcagttctgggaattgcccacccctttcccagaaaattaatgaataatccacctcgtttagcatataatcaagaaataaccataaaaatagccaaccagctggcctcaaggctgctttgcctatggagtagccattcttttatttcttctctaataaacttgctttcacttgactctacggactggccccaaattctttcttgcctgagatccaagaaccctctcttggagtctggatcagacccctttttggtaagtttgttaacctaccatcaaaccttttttctccagatgcaaatgttttgagtctctagtcttttactccctgagacatggaaggctaacaaagtccttcaggcttcatgtgacacctgcaacccactggcctcctcttcctcctcttcttcttcctcctctgggatctaggaggaccggccccagccccttctccattgacccagagattcctgatgtcagggactcacatttagtggctggacattgattcgctggttctggctgttggttcctgggagaatcacagtcattttccgaggccccaggtatcctaagacgttgggctcctgggggtattacattccagttggcctggttccttcttctgactatcctaccccattctctcatccccaggacactcacataacacacagcccccagctcctgtctgatccgggcagtattcctggttaaatgctcccggtcaggattcaccccattgtcaaagatggtgaacttggtgctgaagacattggatctgctccaggaagggaatggatagaataaaaatactaagtgttactctttgagtaagtgtcactcatcgcatcgactcttcccatcaatcccctatgtctaagactatgtccgaatgtctaagaatcatgttcctggctgggcacaggggctcacacctgtaatcccagcacttcaggaggcagaggcaggaggatagcttgagcctgggcaaaatggcaaaactccttctctacaaaaaatagaaaaattagttgggcgtggcagtttgtgtctatggtcccagctctcaagaggctgaggtgggaggatcacctgagccccagaggtcaagcctccaatgagccgtgatcttgccactgcactccagcctgggtgacagaatgaaaccctgtctctaaataaatatataaataaataaaaataaataattaaataaatgaggccgggtacggtggctcacacctgtaatcccagcactttgggaggccaaggcgggtggatcatctgtggttgggagttcaagaccagcctgacagacatggagaaaccccgtctctactaaaaatacaaaattagccaggcgtggtggtgcatgcctgtaatcccagctactcaggaggctgaggcaggagaattgcttgaacctgggaggcggaggttgtagtgagccgagattacgccatcgcactccagcctgggcaacaaaagtgaaactctgtctcaataataataataataattaaataaatgaaacaaccatgtttccagcatccatggtcccaggccccctcatttcttgggtgagccatgtactttatgtagcctccctattttatttaaagggccctttaggaaccctcttttttttttttttttttttttttttctgttgcccaagctggagtgcagtggctcaatcttagcttaccaagacctctgcctcctgggatcaagtgattctcctgcatcagcctcccaagtagctgggattacaggttcacgccactatgcctggctaatttttgtatttttggtagagacggggtttcaccatgttggccaggctggtctcaagctcctgacctcaagtgatcctcccgcctctgcctcccaaagtgctgagattataggcgtgagccacctcgccactccctctacctttttggatgcaataattcacacattccaggcctcttttcccacagaaagttaggaatcccagtcccttgcctgtcaaggagtcaaatgccttaaatgccagcctacgttccaaacccttcagttcttctggtccctgagcaggtggaaggtatgctctgtggcctgctgggaaatggagtccccctgtccctaagctccctgctacctgctcctcaccacatgtcagagctctacccacctgactttgcccacgaaattgtccccgtcccgagataggtgtgtaggatccagggagatgaggtaattagaagttttgctccttcttctctttcgcccagccaggaggaagcgctatggatgagaggaacagtccattagaatggacttctggatgctgggtgtggtggctcatgcctgtaatccctgcactttgggaggctgcggcgggcagatcacttgaggacaggagttcgagaccagcctggccaacatggtgaaaccccgtctctactaaaaataaaaaaaattagccaggcgtggtagtgcgtgcctatagtcccagctagtagggaggctaaggcaggagaattgcttgaacccagggggcagaggttgcagtgagctgagatcgcaccactgcactccagcctgggcaatagactgagactccatctcaaaacaaaaataaaaaataatgaaagaaaaatggacttctggaagctggttagagccaggggtccaaagacaaggaaacgtcatgtcccatgatagaggagccagtgatggcacaacaagcttctcaagacttactgggaggccgggcacagtggctcatgcctgtaatcccagcactttgggaggcc[134 bp omitted]gagacaggagaatagcgtgaacctgggaggcggagcttgcagtgagccgagatcgcgccactgcactgggcgacagagcaagactacgtctcaaaaaaaaaaaaaaaagacttactgggaaatgtggttctcactgagggaagccatcagctgggtcctgaatggaagcttcctatcttaatatctcctcctcattccttctgcctatgggtccagagttgaagcttagcccaggaagggtctggctttggagaatggggagcaccctcacttgcaatattgcagcaggactttggtaggcgtttcaccaagaaaaatgggtttggttggctctgagtagggcaaaaaacctctttctagggggagagaggataccccgaggagaggagaccatacttgcagggtaaaggccagaaagactagattgagagaagtggggcttggatctggaaagacaaaccaggggagggacctggttgctgggggcaggatttatctcaggattgagtgaggcctgatagcttatagcaagaaaggctcagtgagggagggtccagactatttttttttttttgacacaagatctccacctcctggactcaagccattttccctcagcctcagcctcccaagtagctgggactacaggtgggcaccaccaggcctggctaattttttttttttttttgtagagacagggttccaccttgctgcccaagctgatctggaacttgtcagctcaaatgatccacctgccttggcctccaaaatgctgagattacaagcgtgaaccaccgtgcccggccttttttttttttttttgagatggagtttcgctctttcacccaggctggagtgcagtggtgtgagatctcagctcattgcaacctccgccttcgagtttcaagcattctcctgcctcagcctcctgagtagctgggattacaggcgcccacaaccacgcctggctaacttttgtattttttagtagagacgatgtttcgccttgttggccaggctggtctcgaactcctgaccttgtgatctgcacgcctcggcctcccaaagtgctaggattacaagtgtgagccaccgcgcccagcccttttttttttttttttttttttttttttttttatgcagagtctaactctgtcgcccaggctggagtgcagtagcgtgatcacatctcactgcagccttgaactcccaggctcaagcaatcctctcacctcagcctcccgagtagcttggactacaggcacataccaccatgcccaaccaattttgtattttttgtaaagacggggttttgccatgttgttcaggctggtcttttttgtgtttgttggttggttttttgttttttgagatggagtcttcctctgtcgcctaggctggagtgcagtgatgcaatctcggctcactgcaacctccgcttcccaggttcaagcgattctcctgtctcagcctcctgagtagctgggactacaggcgcctgccaccactcccggctaatttttgtatttttagtggagacggggtttcaccatattggtcaggctggtcttgaactccggacctcaggtgatccacccgcttcagcctcccaaagtgctgggattataggcgtgagccactgtgcccagccccaggctggtcttgacctagctcagaaaggagtgggattttgcctgggaggtgggggcttactcccaaagctgttgggctggcttactgcacctgcaggctgtcagaggtctccaggtagaggtagtagagggggaacaagcccttgtccacgccgtgcttgtcacgggtgaggtagcactgcatcatggtgcccgggagcgctggccgcagcacgtaggcttccatgtcctcctccagcccagggcagggggagcggattgccaaggaggcttcgtgcctcatatggtcgctgtccgtgccaccctcgcctttcagggccttggacaactcttcgttgtgtgctgctgaggagttcgtccctgtagactcagaggcctctctcttcttttccaagtcttcttcctagcccaggcaccaaatttaaagtcgagggacaaccaccggcccagccttgcttactactgattgaccatcccagccctagggtcccgcccttgcccatccacattttctgcttattggtcaaaaatctcattcagtccacccagtcacgccctcctctgttgactggccagtctattcgctttcctctgcagccacacgcattccacctgctgattggaaaattcctttctgaaagcaaggcccattccgttaaaatggctgttagtttgatctagataacataatacagcccagatctaccctcaagagaaaccatctactgcactttcaccaacaccaaagtgagtgccagttggcccttttcttttattttttaagacagagtttcgctctgtcgcccaggctggagtgcagtgactcgatctcggttcactgcaacctctgcctcccaggttcaagcaattctcctgcctcagcctcccaagtagctaggattacaggctttcgccaccacgcccagctaatttttgtatttttagtagagacggggcttcaccaagttggccaagctggtctggaactcctgacctcaggtgatctgcctgcctcggccttccaaagtgctgggattacaggcgtgagtcaccgttcctggcctgcaactggcccttttcgatcagtgttctgccctttctgaagctcgctgtctttccatggctgcacctatttttttttttttttggacagtctcactctgtctcccgggctggagtgcaatctcagctcactgcaacctccgcctcccaggttcaagtgattctcctgcctcagcctcctgagtagttgggattactggcgtgcgccaccacacctggctaatttttgtattttactagagacagggtttcaccacg[137 bp omitted]tgatttgatgaatggtacacacacacacatgcacgcacgcacgcacgcacgcacacacacaagtctctgccagcttaatcaccaccaggaaaaagagcttctgattgggtggcagaattttagccccaccctcaccagaggtccgaggctagccctcttcttccaatatcctgagtgattgtgcattttcctaccttttggaaggccaagttttcatatacacagtcaccatccattccagggtttggtcccatattgggtgacttgtgtgcatctcccatatcctgggagtcactctcaccctctgcacgggtccctaatgtggggaaaagcaagagagatcagattgttactgtgtctgtgtagaaagaagtagacataggagactccattttgttctgtactaagacaaattcttctgccttgggatgctgttaatctataaccttacccccaaccccgtgctctctgaaacatgtgctgtgtccactcagggttaaatggattaagggcggtgcaagatgtgctttgttaaacagatgcttgaaggcagcatgctcctaaagagtcatcaccactccctaatctcaagtacccagggacacaaacaccgcggaagggcgcagggacctctgcctaggaaagccaggtattgtccaagatttctccccatgtgatagtctgaaatatggcctcgtgggaagggaaagacctgaccgtcccccagcccgacacccgtaaagggtctgtgctgaggaggattagtataagaggaaggcatgcctcttgcagttgagacaagaggaaggcatctgtctcctgcccgtccctgggcaatggaatgtctcggtataaaacccgattgtacgttccatctactgagatagggaaaaaccgccttcgggctggaggtgggacatgcgggcagcaatactgctttgtaaagcattgagatgtttatgtgtatgcatatctaaaagcacagcacttgattctttaccttgtctatgatgcaaagacctttgttcacgtgtttgtctgctgaccctctccccactattgtcttgtgaccctgacacatccccctctcggagaaacacccacaaatgatcaataaatactaagggaactcagaggctggcgggatcctccatatgctgaacgctggttccctgggtccccttatttctttctctatactttgtctctgtgtctttttcttttccaagtctctcgttccacctaacgaacccacaggtgtggaggggcaacccaccccttcacctaaaggatgaaagaagcctggactaagctcaggacagctggatcccaggagtgtgggacaccatcatcagtgctagccagagatggccagaactcctgggttctcagtccctactcatgactcagcgccctcacttgcaacaacctcctcctcctccaggtgcacggaagtctacaagggccagagtttctgattaccctggatctaaggacagggaggggttagggtctttccttttccttatctcagacaaagcatcacagagactgaagatggggggatggagtttggggtgataataattctgtcattgaaatcattggccatctcatgaaaataaaaggaaacgtcaccacaatggaatattataagggaataaaaaggaatgaag[225 bp omitted]gggaggctgaggcaggagaatggtgtgaacccgggaggcggagcttgcagtgagccgagattgtgccactgcactccagcctgggcaacagggcgagactccgtctcaaaaaaaaaaaaaaaatttgttaggtgggccaggggcggtggctcatgcctgtaatcccagcactttgggaggcggaggtgggcggatcacgaggtcagtagttcaaaatcagcctggccaacatagtgaaaccggtctctactaaaaatacaaaaattagcagggcgtggcagcgtgcacctgcagttccagctactcaggaggctgaggcaggagaatcgcttaaacccagccaggcagaggttgcagtgagccgagatcgtgccactgcgctccagcctgaagggggcctgcccctccacacccgtgggtatttctcgcaaggtggagacgagcggctgagagaagaaagaagacacagagacaaagtatagaggaagaaaagtgggcccaggggaccagtgctccgcaagtgaggacccgcaccagcgctgatctctgagttccctcagtatttattgatcactatctttactatcttggtgaggggaatttggtgtgactatagggtgatggtggggagagggtcagcaggaaaacatgtgaacaaaagactctgtgtcataaataagtttaaggaaaggtgctgtgcctggatgtgcacataggctggatttatgtttaactttacataaacatcccagtgcagtaaagagcagtattgccgccatgatgtctcgcctccagccataaggtggttttctcctatctcagaatagaatgtatggtcggttttacactgagtcattccatttccagagacgtgcaggagacagatgcctccttcttatcttaaccgcatggaggcctttctctctcactaatcctcctcagcacagaccctttacgggtgtcgggctgggggaccgtcaggtctttcccttcccacgaggccatatctcaggctgtctcagtcggggaaatcctggacaatgcccaggcttccttgggcaggggtccctgcagccttccacagtgtgttatgtttctggttaatagagaatggagaatggcaatgactttcacaaagcatactgcctgcaaaaccatttttaccaaagcacatcctgcccagccctaaatcccttaaaacttgagtcaatataacacatgtttctgtgagcacagggttgggacaagagttgcagattaacagcatctcaaagcagaacagtttttctttttttttttgggggggg[137 bp omitted]aaccggctaattttttgtattttc[148 bp omitted]tatgtcttcctttttctacatagacaaagtaacgatctgatctctctttcttttccccacacagcctaggtgacagagtgagactccgtctcaaaaaaaaaaaaaatcattaggtgaatgaggtgaatgaagacacacggtggctcacacccgtaatcccagcactttgggaagccaaggtgagaggatcacttgagcccaggagttcaagaccagcct[139 bp omitted]aaccctgtctctactaaaaaacacaaaaaattagccgagcatggtggcacgcgcctgtaaccccagctactcgggaggctgaggcaggagaatcgcttgaacccagaaggcagaggttgcagtgagctgagatcgcgccattgcattccagcctgggagacagagcaagactctgcctcaagaaaaaaaaaaaaaaaggaattgaagaaagaagccacatacaaaagaccacatatgtatacgattccatttgtgtgaaatgtacagaatagccaaatctaagaagacagtggaggttggtggttgccaagggctggggtaaatggaaaaggggtgactgctaattgatgcactatttctttctttcttttttttttccttgagacaaagtctcgctctttcaccctggctggaatgcagtagcctgatctcagtttactgcaacctctgtctcctgggttcaagcaattcttccacctcagcctccccagcagctaggattacaggtgcatgccaccacgcccagctaatttttgtatttttagtagagactgggtttcaccatg[139 bp omitted]attgattgtggtgacggttgcagaattatataaatatagttagcttctcgtatcctacaggctccacatccccactgctgacccaaaatattcaggaaagaaattgaaaaacaacaagatgacaataaataacagaaccaattttttttttctttgagacagagtattgctctgtcacccaggctggagtacagtggcatgatctcggctcactgcaacctcggcctcctgggttcaagtgactctcttgccttggcctccggagtatctgggattacaagcctgcacccccttgcctggctaatttttgtatttttagtagagacatggtttcgtcacgttggccaggctcgtctcaaattcctggactgaagtgaccaaccagcctcagcctcccaaagtgctggaattacaggcactttatttttaaaaatttttttaaataacatataacagctatttacgggccaggcatgatggtttatgcctgtaatcccagcactttgggaggctgaggtgggtggatcatgaggtcaggagtttaagaccagtccggccagcatggtgaaaccccatctttactaaaaatacaaaaattagctgggcgtggtgatgcgcacctgtagtcccagctacttgggaggctgaggcaggagaatagcttgaacctaggaggcggaggttgcagtgagccaagatcacgccactgcactccagcctaggcgacagagtgagactccctcccaacaacaacagcaacaaatatttacattgcatttatactgtattaggtattataagttatctagagatgacttacagtatatggggggatgttcatagtttatatgcaaattttacaccattttatataagggactttggcgtctgcggatcttggtatctgtggggttcctggaacacatcacctgcagataccgaggggcgaccgtgtactggaaaccatggaattgtgaactttaaatgggtgacttgtatggtttgtgaattatacttcagtgaagctgctgcctaagaaaggggaagatttgctgcatgaaccaggagatcccaggtttcaccccaatgtcccctaaattaccaggtcgttggtgggcttgccaacccttgcgtcggattctcggagactgtttaaaaggtgggggagagacggaaccattctccacggagacttcctccaattctgcatcggaattgtctgggagccaggataagaaaggggactggagaccgagattcctgaacactgaggaaggaaggaggggagagttggatttctggatgctgcaggaggaggcggctcaggacctgaactccttggtgtgaggaaggagtgggtgcggtcctgagctcctgagtattttggacagatggattgaggcaccagactcctgggttttagtggggacggagttctggggtctaggaggtcggtggactcgcaaatacctgcttctgtccgcggtgtcgggaggccgcgctcgcccctgccgtctccaccacagctcacggtgcccagggcactgtggatgccagagggcagatgtgcctctgacactttcttccggaggaaagggttcccaaggcctgggagaaggttcagcgagcccatgaaaacgatctacaaattccggtcctcaac[142 bp omitted]gaaacaccgtctctactaaaaacacaaaattagccgggcttggtggcgcatgcctgtaatcacagctactcgggaggctgaggcaggagaatcgcttgaacccgggagacggaggttgcggtgagccgatatcctgccattgtactccagctttggcaacaagagctaaactccgtctcaaaaaagaaaaaaaaatcaccctgtttcgcggaccgcccaaaccttgagacccaggtcccaaactgcatcctaagcctcaaacaagcacagccctgccgctggattgttgcgggctccgcacgtaaagaatctcgcgccaggctctcgtaatgagaccgcgccccgccccggacccctagaccccgtctccgcaatcccgggtttggggtgggggtcccggctttcccaggctccaccaccgagctctgccaagcccaatcatcacattctcttgcccctttcccctgctagttgtaccatgccccgcccctgcgctctgtagccctgccccgaacccctccctcacaggtcctgccgcggggggcccccacaagcctctcccctgggcgcccacaggccctgttctaaagctctcctgggccaaggcccgcccccatccactgccaagtccccaccctaaggctccaccccttcatccactaggccccgcccacagactcccacaggcccctcccctccaggcgaacgcccccaggggtctttggtcacctctgtcacctaaaaggcgctcctcccgcagacaagagcgccaaagccacggggaagcgtcaggattggcctgaaccatgaggagctcctggcgcttctgtcgctgcttcttttcaaacagccgccgctggggagatgggagaggtgggtgtccgggacaggaaccagatgggaagacagaagtgaggtggggcctggggcaagggctcgcatcggcgcgagagttcgtgaaccccttcctccactggggcccacacgtccaggccctcagttcttcagcagctcctcccttattccaccgttggactcagatccaagagtcctgacaccctgtcctctcatcccccaggacccaggagtcctgccttctagaagccttgttccttagaaattcatcacaagggtttgtttgcttctttagaacccccaattcctattttcttttctttttcctttcttactttttttttttctttttgagacagagtctggctctatcgcccaggctggagtgcagtaccacgatctccgctcactgcagcctccgcctcccggattcaaacgattctcctgcctcagcctcccgagtagctgggattacaggcgcctgccaccacacctggctaattttttgtgtgttagtagagacggggtttcgccgtgttggccaggcttgtcttgaactcctgacctcaagtgatccgcccacctcagcatcccaaagtgctgtgattacagccgtgagctgccctgcccggccccaaattcctattttctcatttctcagtgggaaaactcaaggatgagagacagccaacacgggctgggagtcctagagcaagacctggtggagaggcccctggggaggcacagaaggcggaagagttggagtggtgagattcctgggcacaatacctgctgttccagcttctgcagcctcatagcagcgagctcatgccccaggatgctgagagagacacaggcccatggtgacagtgcacagggaacctcggttgcccaagagagtccctccttcccccatcctgcccctatctcagcttgggttctgggcacctgtgaggtcacaggaggtgcagaacctgagcctgctccaccagttatagggccctttctcctggcactggcccacagaagccgggacccagagatcccaggtccctcctgtctcaggattcaggagtctggggcccccaaccccttctctttcagacccagaagtctgcaccctagccccatcccttcaggacacaggagtccaggtccccagccccttcctgcaaggccgatggtgctgaacctgcaaacatggttatgaagccagagccgagtgcacggggtccccagccctttccacctccacccctacccatctgtttccctactcactctctcatcaatgtgtcattatcctgagacattctgcagaagcaagaatgaggagtcaggatcagaaccaacatcccaatggatcctgcccaccagcacctaatctttagccttatttatttatttatttatttatttatttatgtatttagagacagctgagcctcgctctgtcgcccaggctgcagtgcagtggcgccatctcggccactgcaacctccacctcctgggttcaagcgattctcctgcctcagcctcccgagtagctgggactacaggcgtccgctattctgcctaatttttttgtattttagtagataccggttttcactatgttggccaggctggtgccggactcctgacctcaggtgatctgcccgccttggccttccaaagtgctaggattacaggcatgagccacagtgcccggcctgatccttacctttaaatttgcttccggacccaggcagcccgaatcccagcacccactcctgtcgggatctagtagcctgtttccagcttcccacgggggtccgcaagtccgcttctctctcccccaaatatctaattctccagcacccaggcatcagaactcaggactgtgcacttcaaacacccagcccccagcggcctagaactccactgcccacctgcctgggatccgggagacttgttctcctcaccaggtgcctggagaggctgctcacattgatgcctcggtaccttgcctctctggccaatctctaaacatacctgatcctctctttggaagctggggacctaatctcgggatatctgcgaaatagggaggagaagaaagacggctcagagggagggaggattccctctgggacctgaactggtccactcccttctgaccctccactctccacttccaacaaagtaacgaactcggtcactgatgcagccaggcaaccctgctccgggggttctga[148 bp omitted]cccgtctctactaaaaaaaaatatatatatatacacaaaaaaattagccgggcgttgtggcgggcgggcgcctgtagtcccagctactcgggaggctgaggcaggagaatggcgtgaacccgggaggcggagctcgcagtgagctgagatcgcgccactgcactccagcctgtgtgacagaggtagacaccgtctcaaaaaaaaaaaaaaaaagagagagagagagcgggagaccagagacctcgcgg[264 bp omitted]gcttcctgagtagctgggattacaggcatgcgcaaccacgcctggctaatttgtatttttagtggaggcgaggtttctccatgttggccaggctggtctcaaacccttgacctcaggtgatctgcctgcctcagcctcccaaagtgctgggattacaggagtgaacccccaagcccggcttgacatccgtctctttaaaaaacaacaacaacaaagtgtgagaagtgtgaaagacagaacgttaaaaaaaaaaaaaggctaaaaaagaattaaagatttaaatatttgtattaaaaatttaaaaaatatacattagccaggcatggtagtgtggcctgtggtcccatctacttgggaggctgacgcgggaggattgcttgggcctgggaggtagaggctgcagtgagaagtgattgcgccactgcactccaacctgggtgacagagcaaaccctgtctcgaataataagaagaagaagaaagaaactcataagaaaggctatgcaattgctaccgcgctataacttccaggcacttcgtggggcgaaaataaatgggaaaactacagctcccatgaggcgaaggggccacgatgcccgcggaagttatttttcccccggccggcagggagttgtagttatctttgaaagccttctctctcttttggcataggcgggaaatgtggcgtcaagaggctgggattccgagaaagaagcgaggctttcacgaaaatgcgagcggcttcggcaaggggcggggccgctggacgtggatgaaagctacagagccagcgtggaccaatcagacctctttggggcggggcctctgtggataagtgggcgtggtctaggggggaagtcaccaagaacgcaccggaggtccttgcccgccctggaaaacgccctctgcggtgaaggagaggtgagaggccagggttcccatactcttgggtcctagggaggatgggggccagagggctggaaaactgggtcccggaggaggatgcactgggtgccagtactttaggtcctgggaaaagaggaggctgggaccctggactcttgggtctgggggaggaggcggccgagatcccggattcctgagtgtgagagaggagcgtgttgggagccaggacccctgggtctgagggcccagactcctgtgtcggaggaagggaaggccggaggcctggaatcctggggcctgggtaacaaaatgcttgtgtcttgattcttggaagtgggggcggcgctgggggcccgaactcctggttccaggggaggaagaggcttgggacagacattatgcattatccagccctccatcccccacagaccacactgccatgcctccctctgggccccgaggaaccctccttctgttgccgctgctgctgctgctcctgcttcgcgccgtgctggctgtccccctggagcgaggggcgcccaacaaggaggagacccctgcgactgagagtcccgtgagtggccctgccctgctatccagccaggtgtttgcagtggtactacagctcctgcagaccccggtgcccgtagggcggatgctccagtgacttcctggccctacagttgtagcttgttttttgcccaccattcctcccagcagcaggggtttgacttggtgaaaaactggaggtccctgactctgaggtgtggaaaatctgcatcacgccccaactaaacgtctgtttttttaagattctctccacccaagaaggaatttgaaaacaaacaaacaaaactacatttcccagtagcaccatgttgctagttcccagtagcagttgatgttggctagctggggtattctgacttcatggtgctcttgggagttgtagtttaaattacagaagggcgggtgaactgcttgtttattaattcctacatgtgtttatcaaacccaataaaagctttggtcttaagggatttggaactttggagatcctgaaggtcagtgagtgtcttgtggtccgaatcttcctatagctccccataaggataggctggtcaggccaggcgcagtggctcatgcctgtaatcctagcactttgggaggccgagacaggcggatcacttgaggtcaggagttcaagaccagcctggccaacatggcaaaaccccatctctaccaaaaatgcagaaattagctgggcgtggtggctcacgcctataatcccagctactctgggaggctgaggcacgaattctcgtgctggaaccaagagaggtggaggttgcagtgagccaaggtcacgccattgcactccagcctgggcaacagagctgagactctgttttctgagactgtctcaaaaaacaaagaatgggctagtcattaccccctggaacggatcattgcatgttcctggtccccacgctgcaagttaggcctctattctgtgaaatccttgcagacccaggaaggctttgttgagtcccatttcttttcttccattccacatgtttcctgagcaccttctatgagccgggcatagtgttgcctatgtgttgcatagttgttagggcccagccatgtgcatgccccatgcccatggactatccctgctcactgggagatggaagacaaagggcagggctctatgagagtgaacaccaggggtgacagtcagggaggaagggaggcgtgagttgagttctttctttctttctcgctctgtcaccaggctggagtgcagtggtgcaatcttggctcactgcaacctctgcctcccaggttcaggtgattctcctgcctcagcctcccgagtagctgggactacaggcgcacaccaccacgcccatctaatttttgtatttttagtagagacggagtttcaccatgttggccaggatggtctcgatctcttgacctcttgatctgcctgcctcggcctcccaaagtggtgggattacaggcatgagccacctcattttttcttttcctttttcttttttttttttttttttatttttgctgtgtcacccaagctggagtgcagtggtgcaatcactgcaatctccatctcccagactcaagcgatcctcctgcctcagcctctggagtagctgggactgcaggcatgtgccaccatgcctagctaattttttttgtatttttgatagagacagggtgtcattatactgcccaggctagtctcgaactcctgagttcaagtgatttgcccgcctcggcctcccaaagtgctgggataataggtgtgagccactgagttctgaactggagagatatgttaagtcaagagcaaggaagagaggaagtgaggggaagagcattccaggcagagggaacagcatgagcaaaggccacttggtaggagaaagcagagcaagttgaggacgtcaaggaggctgctgtggctggagcagggagagtgagagggaggggagagggggattatgtggatcatgtgggatcttgtgagactaggtaaagaggtaaagaatgtatatatatatatatatgtttaatagacagggtcttgtgctggtgcccaggctgaagcgcagtggcaggatcatacctcactgcagccttgaactcctgggctcaagtgatcctcctacctcagcctcccaaagcactgggattacaggcatgagctaccatgcctggccttctctcttttgtaattttatttatttattttttccaacttatcttatttgcttttcaccacaactctgggaggcagaggatatattgcctattttataaatagtaagagcatagaaggcccagggagagtaaagtcccacccagctacgcatgacgggggtgggactaggaggcctgggacttttgtctgtgttgttcacagtgcctggcatatgataggggcctggtgaatgtttgttgaatgaatgaatgcatgcatgggcgggtgggtagatggatgggcagttggatggatgggcgggtggatggatgggtgggtggatgagtggatggatggatggatgggtggttggatggatgggcgggtggatggatgggcgggtggatggatgggtgggtggatgagtggatggatggatgggtgggtggatggatcgatgggtgggtggatggatggatgagtggatggatgggcgggtggatggatgggtgggtggatgagtggatggatggatggacgggtggttggatggatgggcgggtggatggatgggtgggtggatgagtggatggatggatgggtgggtggatggatggatgggtgggtggatggatggatgagtggatggatgggcgggtggatggatgggtgggtggatgagtggatggatggatggatagatggatggatggatggataggtgggtggatggatgggcaggtggatgagtggatggatggatggatgagtggatggatggatggatggatggatgggtgggtggatggatggatgggtggatggatggatggatgggtgggtgggtggatggatggatgagtggatggatgggtggatggatggatggatgatgggtggatagatgggtgggtaggatgtatgtatggatgggtgggtgggatgtatggatggatgggtgggtggatgcatggatgaatgggtggatgcatggatggatggatggttggatggatggataaaagtatgattcacagcttcccaacaagtcatgtccactctgagcacccactctgggcagtattgggctgggtgttcactgatgtgattttcatttcatctttgctgcatatgtgggaaaaggtaaaaactgagtcccttgtcagctgccccagggagcaggccatagcagtaacaggagtgagggtggggatggggatgggagcaggggctgctatgtctgtccttgttgcctcaggacacaggcctgtactaccaccggtacctccaggaggtcatcgatgtactggagacggatgggcatttccgagagaagctgcaggctgccaatgcggaggacatcaaggtgcggctgggggagtgggggctgtgggaggggtacgtgctgggagggcagagttcaggggaggactggtttctttttttttttttttgagacggagtcttgctctgtcacccaggctggagtgcgatggtgcgatctcagctcactgcacctccaccccgcaggttcaagcagttctcctgcctc[134 bp omitted]gcttcccaaagtgttgggattacaggcatgagccaccatgcctgaccatactggtttcttcaaaggggccacatggctccagctgtgcctgtatttgaaaatcaccaaagtaagactcagggagaagttgcttcttggggtcacaagctgggaagagctttggggaacacagaatacgtgtttagtgcagagtcccgtgggcaggctttcagtcgcagctccgccgcttaccagctatggggcctcccctcaccgtgcctcagtttccccacctgtaaaatgggagacatcatagaacctgctgcacagttcggatttggattttccaagggaaggattttggggtttggattttccaaaggaagatgtgtaaagggtttggaagagcatggtgacactccttagcaagtgttgtgggagggctgcgtcaacagaatgctcctatggtgccttctacagaggaagaattcaaaataagggaggtgctggtgtcccttacatcaccatgaactcccatatcaggcctctaggagcaccatcattgtccccatttcactgagtaggacactgaaccctcgtatcaggatctgtccttctcatggacctgggtctcaccaccatgcacggctaattttgtattgtttctagag[131 bp omitted]gggcagcacaggtgggcagggccttgaatgccaggctgacgggctgggagctgtccttcctggagactctgaggagctgggggactataagcagggaaggggcagtataagactggggcatgagaaagcttataagaagcttccagagaagacagagagcaggcccccaggctgaccagggtctcctctcctgtcagagcgggaagctgagccgagagctggactttgtcagccaccacgtccgcaccaagctggatgagctcaagcgacaggaggtgtcacggctgcggatgctgctcaaggccaagatggacgccgagcaggatcccagtgagcaggggcagggcgggagggacaggcagggaggggtggggaagggtggcctcactcccggcctccaggtggttgtgtgctaggcaggtgaggcctccctccccgctgcgaaatgtgctgaaatgtgcgtgggagattgccccagtgttcctcccagcatgatttaatattaacattacaatgttgtttgtttatattctgtttccatttgttgtttttaaaaatctttatcatgggctgggcacagtggcccacggctgtaatcccagtactttgggaggctgaggcaagcaggtcacctgaggtcgggaattggagactatctggccaacatggtgaaaccccatatctgctaaaaatactaaattagccgggcatggtggtgcacgcctgtaatcctagctgctcaggaggctaaggcaggagaattggttgaacccgggaggcggaggttgtagtgagccgagatcgcaccattgcactccagcctggacaacagagtgaaactctgactcaaaaaaaaaaaaaaaaaattgtcatttaaaattctggtagaggccgggtgcagtggctcacgcctgcaattccaacactttttgaggcaggagaatcactcgagcccagaagttcaaaaccagcctgggcaacatagcaagacccctgtctctataaaaaatattaaaaaataagctgggcatggtaatgcatgcctgtggtcccacctccttaggaagctgaggtgggaggatcgttgagcctgggatgtcaaggctatagtgagccatgactgcgccactgtactccagcctgggcgacagaacaagatcccatctcaaaaaaaaaaagttgaaagaacttcaaacttttagaaaagttgtaagagtagtacagaaaactcccaaacacccctgacctggcttctctagttaacatttgctccatttgctttgtcactcacgtttgggacttcaccacagtcaccatctcatcacccttacacatttcagtgtgatactcttgcataagtacagcgataaaatc[134 bp omitted]tcctggattcacgccattcttgtgcctcagcctcccaagtagctgggactacaggcgcccgccaccatgcccagctaattttttgtatttttagtagagacggaatt[131 bp omitted]atcttgctctgtctcccaggctgcactacagtggcgcgatctcggctcactgcaacctccgcctcctgggttcaagcaattctcctgcctcagcctcccaagtagctgggattacaggtgtgtgccaccacacctggctaattttgtatttttagtagatacttgattttgccatgttggccaggctggtcttgaactcctgacttcaagtgatcctcctgtctcggccttccaaagtgctgggattacaggcctgagccaccagccttggcccccatcttaaggtctttaatgtaatcccatccgccaggaccccttagcccggaaaggtcacgcattcacaggttccggggatcaggatgtggatatcttttagggcaccagtatccagctgccacaacacccaggctcttcccgtccctcctctgcccagagcctgcccccggcaccccagtgccctcaggcccgcattcatgttcctcttgtctgctcggagcctgggtggaccttggccacacccgcccaaccctgcccttcccgtatgcaccctgaccttcttgcgtcagcatttttagaaattgctggcgtgcagccttgggacctttgtccgttcgccccgctctcccgtgacattctttctcagggctctttgcctggtccatggaccttccatctcccctggaatgtcacctcctcagggtgtcaccgccccggctgtcctgtgtgaaggagcctctgtgttatttgtgtccttggtattcctttgttcatcccttggtcgcctgttctctgtctctctagactgggtgct[136 bp omitted]gcctcctgagtatctgggattacaggtgcccgccaccatacctggctaattttgtatctttagtagagacagggtttcaccatgttggccaggctggtctcaaactcctgacctcaggtgatccacccgcctcagcctcccaaattgctgagattacaggcatgagccaccccgcctggcctccaagagtcagaattctgtcatcatttgattcctgctgtgtccatagcggccggcgctgggtcagcctggaatagcggctcaacacacgtccctggcacaaataatgaatttgagattcagtttgtacctgtgtcctgcacacctgtcactcctctgggctcagccagggccggagctgcctccactgcagcctaggtctcccaaattctagctgcccgtgtgtgtgtgtgtgtgtgtgtgtgtgtgtgtgtgtgtgtgtgtgtgtgtctttctgcccacttgaccaaggggtgtgtgtgtgtgtgtgtgtgtgtgtgtgtgtgtgtgtgtgtctttctccccacctaaccaagggccactggaggccagggccaggctgattcattttgggtccagcattgcacagcgcaggcctgggcccctagaagcctcgggagacatgcgtgcggtaagtgtgtgttggcagcgtgtgcgctgtcctttcctgcctggaaaccctaccccttcctgactacttggaaactcccatatgagggaggctgcacttgtttgctgaggccgctgtaaccaagtaccactgaccaggtgcttcagcaacagaacttgactgtctcatggcctgcagtcagagtccaaagtgaaagtattggcagggttggttccttctggggctatgagggaggatctgtaccaggcccctctccttggcttgcagatggccgtcttctcactgcattttcacaccatctttcctctctgtgtgcctggcccaaatttctccttccattattattttttattaattattattattattatttttttttttttccaagacagagttttgctctcgttgcccaggctggagtgcggtggcgcgatctcagctcactgcaacctctgcctcccaggttcaagcgattctcctgcctcagactcctaagtagctgggattacaagcacgcgccaccacgcctggataattttgtatttttagtacagatggagttttgccatgttgggcaggctggtttcgaattcctgacctcaggtgatccacccgccttggcctcccaaagtgctaggattacaggtgtgagccaccgcgcccggcctattattattttgagacagggtttcacttctatcctccaggctagagtgcagtggtgcgatctcggctcactgcatcctccccctcccacgctcaagtgattctcctgccttagcctcctgagcagctgggactacaggcacacaccactgcacacagctaatttttatattttttgtagagatggggtttcaccatgttgcccacgctggtctcgaatgcctgagcccaagtgatcctcccacctcagtctcccaaagtgctgggattacaggcatgagccactgtgcccagtcataaatttctgccttttataaggtcaccaatcatgttggattagggcccacagtaatgacctcatcttaacctgattccctctgtaaagacctagtctccaaatcaggtcacattctgaggtactggggcttaggacttcaacatagaaacttaggagcgtgcaatttaacccctaagattggttgatgctttatcaaaaattttgatgtttttcttttgtttgtatgtatgtatttattttatttatttatttttcagacggagtctcactctgtcaccaggctggtgcagtggcgtgatctcggctcactgcaacctccgcctcccaggttccagtgattcccctgcctcagcctcccaagtagctggggctacaggtgcgcaccaccatgcccagctaattttttatgtttttattagagatggggtttcacc[143 bp omitted]cacacctgtaatcacaacactttgggaggccgaggtgggtggatcacctgaggtcaggagttcaagaccagcctggccaacatggtgaaaccctgtttctgtttctactaaaaatacaaaaattagccgagtgtggtggcatgcacctgtagtcccagttactcggggctgaggcaggaggattgcttgagcctgggaggcggaggttgcagcgagccgagatcctgccactgcagagtgaaaccctgtctcaaaaaaaaaaaaaaagaaggaaaagaaaaaaagaaatggttgagtgtcatggtttttggatgtccaatggctggttcccatccttgctctgccacttgctagctggtaccctagaccagtcacaacccctcaaggggtctcagttttcacattcataaaatggggataatcataaaacccttgttgtcaggattttgtggaaagtgaatgaattaatacagttaaagtgcttagggcatggcctggcatctagtaagtaggcactacatgttagtttttattatggttattattgtaagcatcagactcagtcgtgggatcacctcctccaggaagccttccctgattgccccaggttcaagctgtcttctgggcttccctagtgctgtccgtgacttctttggatcatgtctggcccaagatgggggttctgaaagaacatgccctcaggtgttggactcttccctctcttccagatgtacaggtggatcatctgaatctcctgaaacagtttgaacacctggaccctcagaaccagcatacattcgaggcccgcgacctggagctgctgatccagacggtaatgggagtgggtccggaggcagaggattgagggtagctttgcggaaggggagaaggggacagagtcccagacgtgagccagctcaccattcctgctggtgttctctgaggttggaggctggtagagggctgagtcgtttcttttcttttctttttttttttttttttgagacgaaatctcgctgttttcccccaggctggagtgcaatggcacaatctcggctcactgcaacctccgcctcccgggttcaagcgattctcctgcctcagcctcccgagtagctaggattacaggtgcctgccgtcacgcccagaaaatttttgtatttttagtagagacagggtttcaccatgttggccaggctggtctcgaactcctgacctcaggtgatccacccgcctcagcctcccaaagtgctgggattacaagtgtcagccaccgcacccagctcttcttatagtgatacccaccgtaatctagcaggccatcatcttaactaattacatctgcaaacactctatttccaaataagatcacattctgagattccaggtggacatgaatttgggagtgtggggggagtatactgttcaacctggtattgttaactccattttacagaggtggaaactgaggcacaaagaggctgagtaacttgcccagtgtcacagagcttatgagatttggtcacaaagcaaagcctagatttgaacgctgggcaaaatagttagaaacctcttgttctttttttggtttatttttactttttttttttttttttttacctgagacagcgtcttgctctgatgcccaggctggagtgcagtggcatgatcacagctcactgcagcctcaacctcctgggctcaagcaatcctcccacctgaccctcctgagtagctgggaccagaggtgcaagccaccgcaccaggctaattttaaaaatttttagtagacacaaggtctcgctgtgttatgtgagttagtcttgaactcccgggctcgagtgatcctcccaccctagcctcccaaagtgctaggattccaggcgtgacccacctctcctagtctgaccttatgttcttggccacctagctgtacctgaaatacataaatactaagttcaccacatatgttgttcctatttacttattcctccaagatctggagattgtggaggacttgaaagaggtgggttgaagttgctattgtataaccgtcccaatctgttttgaataaagagaagaaagtgtgttatggggcaggagcagtcatggaaaccaaaaagggcgacatcaggctgtgcgcgatggctcacgcctataatcccagcactttgggaggctgacgtgggcggatcacctgaggtcaggagtttgagaccagcctggccaacatggtgaaacctcgtttctactaaaaatacaaaaatcagctgggcctggtgacacatgcctataatcccagctactcgaaaggccgaggcaggagaatcacttgaacccggaagacagaggttgaagtgaggcagtgagcagagattgtgccaccgcactccagcctgggcaacagagcaagactccctctcaaaaaaaaaaaaaaaaaaagggacattaggacacgagacgtaagaaagacaggtagaggctggggctgccctcagccaggttcagggccaagggcctgccatttacaggctggaattgggggctgggcagagggggcagaggggaatgaccctgtgcctttccccaggccacccgggaccttgcccagtacgacgcagcccatcatgaagagttcaagcgctacgagatgcttaaggaacacgagagacggcgttatctggagtcactgggagaggagcagagaaaggaggcggagaggaagctggaagagcaacagcgccggcaccgcgagcaccctaaagtcaacgtgcctgtgaggaccccatttgtgcccatccactccctaccacatccagttcaaacgcaagacaagaaagcagttaaagaactacaattcccaggggcccttgaggcaaaaaaactccctgttactgtacctggctgccccagggtctgctgggagttgtagttttcttagttttcttgcttgagggagatgatgtttgttggatgagggtaaagggatatttggttttatcccatggcatccagacttcttgctcatgagctcctggctctcccctccacagggcagccaagcccagttgaaggaggtgtgggaggagctggatggactggaccccaacaggtttaaccccaagaccttcttcatactgcatggtaaggtggggagggagttccagagccaggatgaaccctagattctgacccttctaggacctgaatgctaagaggggtgtgtctgtcccaggagggcttagtcaggcccaagagccaagcctatgtcccctggttgaccagacagccctgcctctcccgactacaaggctaggatctgcatggaagggttgggcctcttttctagcaaacaccagacctcggggttctaaggacagctggtgtcctctgtaagcaaaccaggcttggctaggcctgggccctctgcccacagcagcccaggagaagccctggtccactctgggaaccctgtcgctaggagtgggttgttccctaagaaccaggcctccagaagcctggaaaaccctttctctttttctttttcctttttttttttttttttgagatggagtcttgctctgttgcccaggctggagtgcagtggcatgacctcggctcactgcaaccccctgccctccgcctcccgggttcaagtgattctcctgcctcagcctcccgagtagctgggattacaggcatgcaccaccatgcccggctaacttttgtatttttagtagagatggggtttcaccatgttggccaggctggtctcgaactcccaacctcgtgtgatctgccccctcagcatcccaaagtgctaggattacaggcgtgagtcactgcgcccggcctcgaaagccctttctctatggtggatcaaaggcacactcccctcagtctgtctcttcctgtctggaaatgtggcctggggttgccaagccccctcaggtatgccaagcaccctgtcccagaatctgtagccggtcagataagcttagcaaggcctgactcattcattcagcaaacctttcctaagttccctctaaggaccaagctttgtcaagaccccgtggatacaactgtaaacaaaacaaagtacctccccctcagagccagtgatcaggcacacagatcataccatactttagtaactccacgagactgtacagtatgagaggtgctagcattttacgtaagctgccaattaaattaacgtaccattgaaaacaagatgcgtcctgggctgggtgtagtggctcatgtctgtaatcccagcactttggtaggccaaggtggaagatggcttgagcccaggaatttaagaccagcctggacaacaaagtgagaccctgtctctatttaaaaaaaaaaaatagaccaggcgtggtggctcacgcctataatcccagcattttgggaggttgaggtgggaggatcacctgaggtcaggagttcaagaccagcctggccaacatggtgaaaccccatctccacaaaaataccaaaattagctgggcatgatcgtgagtgcctgtaatcccagctactcaggaggctgaggtgggagaatcacttgaacccgggaggcagagtttgcagtgagccaagatcgtgccattgcactgcagcctgggtgacagagcaacactccatctcaaaaaaacaaagaaaaaaataaaaattaaaagttaaataaataaagatacatccctatttcaggggtgataaaatagaagaacacaaaagtgcatctcagaatcaacgaaggttctaggccgggtgtggtggctcacgcctgtaatcccaacactttgggaggcctaggcgggtgggtcccttgaggccaggagttggagaccagcctggccaacatggcaaaacccagtctctactaaaaatacaaaaattaaaaaacaaaacaaaaattagccaggcatggtagtgctcacctatagtcccagctactcaggaggctgaggtaggagaatcgcttgaacccgggaggcggaaggcgggggttgcaatgagctgagatcacaccactgcactccagcctgggcaacagagtgagactctgtctcaaaaagcaatagaaagtaaaaaagaattagaagattctgtaatggggtctcaggtagtgacgtgtactacctcgcagccttgaccacccaggttcaagtgatcctccccctcagcctcccaagtatctgggaccacaggcacgtaccactatgcctggctaatttttttaatttttagtaaaggcaaggttttaccatgttgcccaggctggtctcaaactcctttgctcaagcgatccacctatcttggcctcccgaagtgctggggttacaagcatgagccatcccaccgggcaccaccccccgtgttttgttttgttttttttttgagacaggatcttgctatgttgcccaggctggagtcaaactccaggcctcaaacaatcctcctgcctcagtcacctgagtagctgagactgcaggtgtgtgccactgcgcccagctttaaagatgtttaattgtacagttcaatagtattaagtatatttacactgtcatgcaaccaattctgagagctcttcatctcgcacaaccgaaaccgtatccattaaaccactcgccctccccttctttcccctgctctctagcaaccaccattctattttctgtctctatgattttgactattttaggtacttcatgcaagtagaatcttttggtatttgtcgtgtgtgtgtgtgtgtgtgtgtgtgtgtttggcttatttcacttagcataatggtgaggaactgaagttttcattctactggatattaatttctatttcaattgccccatgtggctagtgg[145 bp omitted]cacaaacccatctctacaaataaaatacaaaaattagctgggtgtggtggcgtgcatctgtagtcccagctccttgggaggcagaggtgggaggatcacttgagtccaggaattcaaggctgcagtgagctatgatcataccagtgccctccagcctgggcaacagagtgaaaccctgtctctaaaaaatagaaaataggctgggctcagtggctcacgcctgtagtcccagcactttcggaggcca[132 bp omitted]gaggcaggagaatcacttaaaccctggaggtggaggttgcagtgagctgagatcatgccactgcactccagcctggcaacagagcgagactctgtctcaaaaataaataaacaaataaataggcccggcgcagtggcttacccctataatcccagcactttgcgaagccaaggcggctggatcccttgagaccaggagttcaagaccagcctgggcaacatggcaaaaccccatctctatgaaaacaaatacaaaaattagctgggtgtggtggcgtgcatctgtagtcccagctacttgggaggctgaggtgggaggatcacttgagccgaggagttcaaggcttcagtgagctacgatcacaccattgcactccagcctgggtgacagagtgagaccctgtctctaaaaaataaaaaaataaaaaccttatttaatctttttaatcaggcagtccctacagaccagaataggttcagagcaactccctatacctttttttatttttcattttttttatttttagagatggggcttccctttgtcacccaggctggagtgcagtggcgtgatcatggctcactgcaacccagacctcctgggctcaagtgattcttccacctcaacccttagagtagctgggatcataggtgcacaccaccatgcccagccaatttttaaattttttttttctttttgaggcagagtcttgctctgttgcccaggctggagtgcaatggcatgatcttggcacactgcaacccccgcctcccaggttcaagctattctcctgcctcagcctcctgagtagctggggttacaggcacttggcattatgcctggctaatttttgtatttttgtagagacggggtttt[148 bp omitted]catcttttctaagctggtctcgaacttaatgtgctcaaatgatcttgccttagccttccaaagtactgggattacaggcatgagcccctaaatttggcccctacattttctttaatcttaatcaatttacatttaaacagcccatgtggctagcggctactgtactggacagcgcagatccagagtttaggcagagaagagacccccaggcctgagccctgggccacactagcatgtggaggtcaggaagaggatggagccgtcaaaggaggtggaggggcagccagagaggacagaatcatgttctggaagccaagggcagaaagtcaagtcagatgcaggtggaaattaaccactggatttgcaagatgagggttcctggcctcctcctcaggaggaaggttgtgcttgtctgagggagccgaggaaggagggccggtggtgaggacaggaagtgtggctgaccgagcctgaagccctgcagctgtggggtctacgttggtaggagaggctcccctcacaactggagtcggcactggcctggttgtctgggaggcagaggtccctgataaccctggagctgactctgtgtccagagcactgaatgccagggccagagaatcctgcatgacagtgacccaagcatgtttcctcgaaccctccctttgatctattccattctcaaccccctggtcgctaggcagtggccctagcaacgggtctagtggggtactaaagcctgggggccaccgttccaccgcgggagacccgtagttacctgtcctctgataacagaccccacatcagcccaaaatttcttcaccagggaccttacacatcccgtcctcggtcccctgagataccttgctatcctcttcccttcagatatcaacagtgatggtgtcctggatgagcaggagctggaggcactcttcaccaaggaggtgagcatcttggaagcctcgggcacctggagggacgcccaaatcagccacttgtttcctcctgcagtccccttaaatccccctggatgggagctcagtgaaaactacaactcccatcagcccctggggcaaaaacggctcccaggagtggtagcgtgcccaaaggactgctgggagttgaagttgtcgggaatgagctcgctggggacctctcaatgctgtctgcctctcgcttgctcctgcagctggagaaagtgtacgacccaaagaatgaggaggacgacatgcgggagatggaggaggagcgactgcgcatgcgggagcatgtgatgaagaatgtgaggtgggggccaggcgggggagaggacgggcccccagctctgtcactcacccttatctggctccccaggtggacaccaaccaggaccgcctcgtgaccctggaggagttcctcgcatccactcagaggaaggagtttggggacaccggggagggctgggaggtgagaacatgggggatactcggggtcctgaacctctctctcttctagccatgacctttctttcagaatcttaggccccttctctttctctctgggtccccgtccattctcctgggtcactgcatctctatctctgggtctctgttttcccctgtctctaggactcttatttatttatttatttatttatttatttatttatttattctgagacggagtctcactccatcgcccaggctgcagtgcagtggcacgatctcggctcactgcagcctccacctcccaggttcaagcaattctcctggctcatcctcttgagtagctgggattataggtgcgtgccaccacacccagctgatttttgtatttttagtagaggcaggatttcaccatgttggccaggctggtctcaaactcctgacctcaggttatccacccaccttggcctcccaaagtgctgggattagaggtgtgatttttttttttttttttttttttctgaaacagggtcttgctctgtcgcgtaggctggagcccagtggtgggatctcggctcactgcaacctccgcctcttggattcaagcgatcctcccatctcagcctcatgagtagctgggattacaggcgtgagccaccatgcctggctaatttttgtattttttgtagagatggggttttgccatatcggccaggctgctctagaactgctggactcaagcgatccacctgacctggcctccctaagtggtgggattacaggcatgcaccaccgcaccacacctagctaatttttgtattttttggtagagacagggttttgcatgttggccaggctgctctgaaactcctggactcaagctatccacccttctcagcctcccaaagtgctgggattacccaggctggagtgcaggggtgttatcatggcccactgcagcctcaaactcctgtcctcaagtgatcctcctgcctgagcctccctattagctgggactacaggcacatgccagcatgcctagctaatctagctcattcttttatttatttattaatattttttgagacagggtctcctgtcacccaggctggagtgcagtggtgtaatcatagttcactgcagccttgaattcctgggctcaggtgatcctccttccttagcctcctgagtaactgggactacaggcacataccaccatgcccagctaatctaggtctctgttttatttatttatttatttgtttgtttatttttcaatacagagttttgctcttgttgcccaggctgtagtgcaatggtgcattctcagctcattgcaacctccacctcccaggttcaagcaattctcctgcctcagcctcctgagtagctgggattatatgcatgtaccaccatgccctgctcattttgtatttttagtagagacggggtttctccatgttggtcaggctcatctcaaactactgacctcaggtgagccacccacctcggcctccgaaagtgctgggattacaggtgtgagccatggtgcctggcctatttctatatatttttcaagatgcccagccaattttctgtagagacagggtctcgctccgttgcccaggctgaccttgaactcctggcgtcaagtgatccttcccactttcgcctcccaaagtcctgggattacaggtgggagccatggtgcccggccttgtctctcggtctttatcccactcccacctcccacttgggcttctttgcccacccacatggccctggcctcccagcctcctctacacctcccccattggcacaaccctctccaacatgggtgggccgaggttggacctgtgcccctgatggcccctgtgcctgccctgcagacagtggagatgcaccctgcctacaccgaggaagagctgaggcgctttgaagaggagctggctgcccgggaggcagagctgaatgccaaggcccagcgcctcagccaggagacagaggctctagggcggtcccagggccgcctggaggcccagaagagagagctgcagcaggtgacagcgggggaagctgcttccatccactgaatctctggctgcccgtgtccgtgtccccatgggtgtccagaagctgggaaggcctgtggccaccatgttaatcactgggggagcctcaagtattcaccgccatcttgagtaagggcagacgttttcccgtctctgacggctctgtggctgccatgtgagataagggcattaaggctgtaagtgaggagggaaaggcccaggagggggagaaaggcagactcagccagggatgggtgagggtttccctgtcccaaagcaagacccaagctgtgactggagggagaactggatccttgactattattaagcccgactgtcaatgaaagagagaaactgaggcccacggagaaggggttggccgtgaccacttagcaggctgctgtgaagtctccgtttggggactgaggcctgagcacttgcaatgccagcatcacaccctcttgtctgtgtgaccccccacctcccacaggctgtgctgcacatggagcagcggaagcagcagcagcagcagcagcaaggccacaaggccccggctgcccaccctgaggggcagctcaagttccacccagacacaggtgctggccctagtccagggaggaggggctgcagggctggacccctgggtctgaggttggaggggctgggcctggactcccagatctgagggaagagggactgggggcccagactcccagatctgagggaagagggactgggggtccggactcctgggtctgagggaggaggggctgggggctgggacccctgggtgtgagggaggaggggctgggacccctgggtgtgagtgaggaggggctgggggctggacccctgggtgtgagggaggaggggctgggggctggacccctgggtgtgagggaggaggggctgggcctctggggtcctgggggaggaggggttcggatgtcctgtgccaccattccctccctccatttccagacgatgtacctgtcccagctccagccggtgaccagaaggaggtggacacttcagaaaagaaacttctcgagcggctccctgaggttgaggtgccccagcatctgtgatcctccgggaccccagccctcaggattcctgatgctccaaggcgactgatgggcgctggatgaagtggcacagtcagcttccctgggggctggtgtcatgttgggctcctggggcgggggcacggcctggcatttcacgcattgctgccaccccaggtccacctgtctccactttcacagcctccaagtctgtggctcttcccttctgtcctccgaggggcttgccttctctcgtgtccagtgaggtgctcagtgatcggcttaacttagagaagcccgccccctccccttctccgtctgtcccaagagggtctgctctgagcctgcgttcctaggtggctcggcctcagctgcctgggttgtggccgccctagcatcctgtatgcccacagctactggaatccccgctgctgctccgggccaagcttctggttgattaatgagggcatggggtggtccctcaagaccttcccctaccttttgtggaaccagtgatgcctcaaagacagtgtcccctccacagctgggtgccaggggcaggggatcctcagtatagccggtgaaccctgataccaggagcctgggcctccctgaacccctggcttccagccatctcatcgccagcctcctcctggacctcttggcccccagccccttccccacacagccccagaagggtcccagagctgaccccactccaggacctaggcccagcccctcagcctcatctggagcccctgaagaccagtcccacccacctttctggcctcatctgacactgctccgcatcctgctgtgtgtcctgttccatgttccggttccatccaaatacactttctggaacaaatgcatggctccatgcctgtgtatctggactggtccctccaaaacgctattgccacgtcacctgccggagtcctcatctttgaagactggattcaagcatcacttctgagaggctcaatcctggtatttttccatctgcccctgatgagtctgcagccttcactcagggtcccttcagccacaaggacagaaaacccaaacctgggattaagcaattttttttttttttttttttgagatggagtcttactctgtcacccaggctggagggcagtggtgtaatctcagctcactgcaacctctgccttttgggatcaagcgattctcctgcctccgcctcccgagtagctgggattacagctgcctgccaccacgcccggccttctaatttttgcattgttttagtagtgatgggggtttcaccatattggccaggctggtcttgaactcctgacatcatgatctgcccaccttagcctcccaaagtgctgggattacaggagtgagccactgcacctggccgggattaagcaacttttaaaagatgaatttggccaggtgctgtggctcacgcctgtaatcccaacacttcgaaaggccaagataggggggatcacttgaggccaggagttcaagaccagcctggtcaacatggcaaaaccccatctctactaaaaatacaaagatgagccgggtgtggtggtgggcacttgtaatcccagctactcgggaggctgaggcaagagaattgcttgatcctgggaggcggaggttgcagcgagccaagattgcaccactgcactccaaccggagtaccagagcaagattccatctcaaaaaaaaaaaaaagaatgtaccaggtatggtggctccacctgtagtcccagcactttagaaggcagaggcggatagatcacgaggtcaggagatggagaccatcccggctaacacggtgaaaccctttctctactaaaaatactaaaaaaattagctgggcgtggtggcaggcacctgtagtcccagctactcaggaggctgaggcaggagaattgcttgaacccaggaggcagaggttgcagtgagccgagatcatgccactgcactccagcctgggtgacagagcgagactctgtctgaaaaaaagaaggctgaggcaagaggatcacttgagcttaggagtttgagaccagcctgggcaacatagcgagaccccgtctcagaaaaagaaaaaaaattagctgggcatggtagtgtgtgcctgtagtctcagctgcttaggaggctggtgtgggaggatcccttgagccctggagtttgaggctgcagtgagccatgatctatcactccactgcactccaggctgggtgacagaatgaggccctgtctctaatagaaaaaagaataaataaaaatgaattatgataaaaaccaagatgtcccaaggcaggatgacttcagggaaccaggttctcgcatcccctagctgtgccaaggataggtttgggggctggaccccccctcatggtcccaaggtagctgcagctgctccagatgtcaccaacagccagtgaaggaagaggccgcattctgttctgggcattgttaagtgggagaaaatctgtccccagagttccctctcctttcagccctctcctcatgttcccttatatcccactggctgtgaggcacaggtcagtgacagctgcagacagatccaccaagctggcatccaccagtggtgatttcatcctcacctgggatggggatgctttccttggaccaagttggggtctggtaaaaagcaagcggggaatatttgtttttgttttgttttgtttttggagacagagtcttgctctgtctcccaggctggagtacgatgacgcgatctcggtttactgcaacctctgcctcctgggttcaagcgattctcctgcctcagtctcctgagtagctgggattacaggtgcccagcacacacccggctaatttttctgtatttttagtagagatggggctttcaccatgttggtcaggctggtcttgagaactcctgacctcaggtgatccccccgcctcggcctcccacagtgttgggattacaggcctgagccaccacgcccggccaggagtatttgtttaaatgaaattctggccaggcacagtggttcatgcctataagctcagcactttggaggccagggatgggcagggtggggggtttcaggagaggatgacaggaggatgactcaagctcagagctcaagaccagcctgagcaacatagcaagacctcatctctaaaaaaaaaaaaaaaaaaaaaaaaaaaattagccgggtgttgtggcatgcacctgtggtcccagctactcaggaggcttaaggacagaagaatcgcttggccacagaaggttaaggctacagtgagccatgaccacgccactgcactccagcctgggagacagggcaagaccctttctcgagaaaaataaataggccgggcacagtggctgatgcctataatcccaacgcttcaggaggccaaggaggaaggatcctttgagcccaggagtttgaggccaacctgggcaatatagggagaccccatctctatgtaaaaaaataaataaatagggccaggcgcagtcactcacaactataatcccagcactttgggaggctgatgtgggcggatcacttgagggcaggaattcaagcccagcctgggcaacgtgaaaccccgtctctacaaaaaaataccaaaattagccgggcgtggtggtgtacacctgtaatcccagctactcagggaggctgaggcacaagaatcacttgaacctgggaggcagaggttgcagtgagccaagatcacactactgtactccagcctgggtgacagagcaagactccatctcaagaaaaaaaaaaaaattagctgggtgtggtggcacatgcctgtagtcccagctacttgggaggctgaggtgaaaggatcgcttgggcctgggaagcggtgattgcaacgctgcacatcagcctgggtgaccaagcgggactctgtctcagaacaaaacaaaacaaaaatacatattcccagatcctggaatgtcctgggaagctatatgtgtgtcatgccctcccagctgcacctgaacaatgagcatagcaaacatcagctgcagcctctctttgcctctctcagaaaatgaggggagttgagcttcagtgacccaatctggaaaacgggcctaaatggtgttctttgaaaggttcatataggcaaagcggtccccaaatgccgaaggagccaagaaaccaaagaatgaggccgacccatctagtttgtcaatacagggtggtttattagggggaaacttagagtgtggtcttcgccaggcatggtggcttatgcctggaatcccagcactttgggaggccgaggcaggtggctcacttggggtcaggagttcgagaccagcctgactgacatggtgaaacttgtctccactaaaaatacaaaaattagccaggtgtggtggtgggcgcctgtaatcccagctactggagaggttgaggcaggagaatcacttgaacccgggaggtggagactgcagtgagccgagctcacgccactgcactccagcctgggctacaaagcaagaccctgtctggaaaaaaaaaaaaaagaagtgtggtcttgggcagcagcaagacagatagatcacaccctgcaacccccagacacagggcttctatctcgaggaaagcatatctgtgctctggaagaaacgcgtaggtggctatgggcgatacatcttgtgatggatgtgacaacatcaaggcttgttctggaggaaaggctggtaagtacgtgtttctacataaagagtaacacatccgttagacatgttggaggcattcccagtttcgggttagtcagaagtcacacggcaggctgggtgcagtggctcatgcctataatgccagcattttgggaggctgaggcaggaagaccgttcgagcccaagagtttgaaaccagcctgagcaacatagtgaaaccccgtctctttttttttttttttgagacagagtctcactcttgttgccggtggctcgatctcggctcactgcaacctccgcctcccgggttcaagtgattctcctgcctcagcctcctgagtaactgggattacaggcgcccaccacgcccagctaatttttgtatttttagtagagacagggtttcgccatgttggccaggccggtctcaaactcctgtcctcaggtgatctgccctcctctgcctcccaaagtgctgggattataggcatgagccaccacgcccagccaaccctgtttctttctttttcttttttttttttttttgatacggagtcttgctgtgtcccccaggctggagtgcaatggcacagtctcggctcactgcaacctccacctcccgggttcaagcaattctcctgcctcagcctcccaagtagctgagattacaaaccccgtctcttaaaaaaggaaaaaaatcacatggcagagtagcattttaaaataaagtcacgaggctgggcgcggtggctcacgcctgtaatctcagcactttgggatgctgaggcaggcgaatcacccgaggtcaggagtctgagaccagcctgacctacgttgagaaaccccgtctctactgaaaatacaaaattacccgggcctggtggcgcatgcctgtaatcccagctgctcaggaggctgaggcaggagaatcgcttgaacccaggaggtggaggttgcggtgagccgagatcacgccattgcactccagcctggacaacaaaagcaaaactccgtcttaaaaaataaataaataaataacattaaactacgtcactcagcctgtgaacaatggctcacgcttataacccagcaatttgggaggccgcagcaggtggatcacttgaggtcacgagttcgagaccagcccggccaacatggtaaaaccgcatttctactaaaaatacaaaattagctgggtgtggtgatgggcgcctgtaatcccagctactcatgaggcaggagaatcgcttgaacccaggaggcggaagttgcagtgagctgaaattgtgtcactgcactccagcctgggtgacagagcaagactccgtccaaaaaaaaaaaaaaaaaaaaagggaccatgttctagtgtaggggtaagtggattgttttggccccaaccccaagaggatcaagggagaccactgcagctgcccgagaaattcttgccctctgacaagaaacaccctatccagtctggggaatttgccagtccaacccctccccttggctcaagattctgggaaatcctaaatagtgtttaccattggccttttatcagctccagtataaatgcgtctggccagacttgctttacaactatgcataatggatagttgggccaggcttggtggctcatgcctagtgctttgggaggccgaggtgggaggatcacttcagcccaagagttggaggccagcctaggcaacatggtgagacaccatctctacaaaaaaaaattttattttctgttttttttttgagacggagtgtggcgctgtcacccaggctggagcaacagagccagactttgtctcaaataaataaataaataaataaaacctgcaaaaaaatttttttaaatgccatttttctttctttctttctttctttttttttttg[135 bp omitted]catgcccggctaattttttgtatttttagtagagatggggtttcactgtgttagccaggatggtcttgatctcctgtcctcgtgatccgaccacctcggcctcccaaagtgctgggattacaagcgtaagccaccgcgcctggccatttttctttttaatcaatcctgccacttgaagattatatggtaagggaaatctgcagtctatacacaatactgagttgctccaagcccttgaggattgtgagggacccagtgttctaattcttgctagagtgtctacctccatgttaccagaggcgagtctgaccgggtactgacatgtgatataccattaagtgtgcagtgggttcttttagcctttcccaaatgtctttccacatggcagcgccccacagcattttctttttcttcttttttctttttcttttttttttttttcttttttttcctgggcaacagagtctcactctgttgcccgggctagagtgcagtggcgtgatctcggctcactgcaagctctgcctcctgggttcaagcgattccagtgcctcagcctcccaagtagctgggattacaggtgcacaccaccacgcccagctaatttttgtatttttagtagagatggggt[145 bp omitted]caggctggagtacagaggtgccatcatagcttactgcagcctcaaccttcccagctcaagcgatcctcccgcttcagcctccctagtagctgggaatacagatgcacaccaccacacctggctaattttttgcaggttggtctcgaactcttgggctcaagagatctgcccgccacagtctcccaaagtgctgggattacaggcatgtgccaccgtgcccggcatattttcttttcagtgtttacctttttgcctcctct[141 bp omitted]aaaccctgtctctactaaaaatacaaaaaattagccaggcgtg[134 bp omitted]tcaaaaaaaaaatatatatatatattatatatatatatttttttttttagaccgggtcttcctctgttgcccaggctggggtgcagtggtgtgatctcggctca[133 bp omitted]cttgatctcctgacctggtgatccacccatcttggcctcccaaagtgctgggattacaggtgtgagccactgtgcctggccgctgagtagtattttgttgaatccactggcagcttaaaggacatttgggcttgagctatgtacagctgctaacacctgtgcactggtttgtgtgcaaacatgttattttttctttctaggacaaatacctgggagtatcaaaattattttttgatatttattattaaatgattttttcttttt[138 bp omitted]cctcctcctcccaggttcaagcaatttacctgcctcagcctcccaagaagctgggattgcaggcgtccgccaccatgcttggctaattattttgtatttttagtagagatgggggtttcaccatgtttgccaggctggtttcgaactcctgaccttaagtgatccgcccaccacggcctcccaaagtgctaggattacaggcatgagccactatgccctgccccctccccccactttttttttttggtagagatggggtcttgctttgttgcccaggctggtctcaaagtcctggcttcaagcattcctcccatttgggcctcccacagtactgggattacaggcgtgaaccaccgtgcctggtcccatttgtgtttctattcagcagtttgtgtaaacttgaagtctgtgaatccatgtgtgacactcaggtcttaattattgtctaccaagtaagagaaagtgacaatatcctgccctgtgtgaagctggccagccagttaggaattatcatgtcccaaccagcctgggaaacttggcaagaccctgccttgataaaaagtttaaaaatcgactggacacagtgtctcatacctataatcccagcactttgggaggctgaggcaggaggattgcttgagcccaggaattggagaccagcctggacaacaaagtgagaccttttctgtacaaaaaattgctgggcatggtggctcatgcaggtaatctcagcactttgggaggccaaggcaggcggatcacctgaggtcaggaattcgaggccagcctggccaacacagtgaaaccccatctctagtaaaaatacaaaaattagtcgggcgtggtagtgggcgcctgtcatcccagctactcgggaggctgaggtaggagaattgcttgaaactgggaggtggaggttgcagtgagccaagattatgccactgcatgatcaccccagcctggatgacagagcgagacttcgtctcaaaaacaaaaaacaaacaacaacagcaacaaaaattagcaggctgggtgcagtggctcatgcttgtaatcccagcactttgggaggccaaggcaggcaaatcgcaaggtcaggagatcgagaccatcctggccaacatggtgaaaccctgtctccactaaaaataaaaaaaattagctgggcatggtggagggcgcctgtggtcccagctactcaggaggctgaggcaggagaatcacttgaaccagggaggcggaggttgcagtgagctgagatcacaccactgcactccagcctggggatagagtgagactccgtctcaaacaaacaaacaaacaaatagcggtaagtggggcacatgcctatactcccagctactcaggaggctgaggcgggaagatagcttgagcccaggagtacaaggctgctgtgagctattatcacgccactgcagtccagctaggtaacagagtgagaccctatctctaaaataattaataaataaaacaaaataattagccaggtgtagtagccagtagctactttgggtcccagctactgtagtcccaggtactagggtggctaaggcaggagctaattccttgagctaaggaatttgaggctgcagtgagctatgattgtgccactgcactccttcctgggcgacagagcgagaccctatatcaataataattataataatacagtatattttacataatagaccatagagctcaatgaatcctcctcacaaccctatgtaggtagatgttatcatgatctctgctttccagaatagaaaagtgaggaccagagagggcgacctcttgtccaaaagcaatacagccaagaaggggcaaggagggttttgaaaccagtcggccaggctctggggctcctaacaagcaaagcagcctggtttctaaaactatagcttctggaagcagccaattcacaggtctttacctcctgactgtgagacctccaaaaaatgaccagggatcttggagtctgtttccccctttgtgaactggggacaatagaagctacttcccaggtctgcggggagaaattaggaacgaagaaggtaaagcgcagagctgaggagctggtctacaggtgctctatacatattagtaataattattaagtttgctgttacaatcctctctctctctgtgaacaacccctaatgatgcgtggctttgagagcaaaaaagtcagggcaaagttttgccacaaagtccagagggcaagacattaaatctaactctcaaggattggtgttggcaagaaagcaaacctctcctccccacgctgtccttaccccgcgtatccgacgagcctaaagtcataggtaagagatctgtagaagcgacgtcaaggtgtggttccctctgtaaggcggagctaaacggtgcattcgcccagcggggaagctagaactaaatgaccgctctgccgactggagccaacgagaatcggcgtaggcgcaatacgggcggaggatggggacccgcccccggggtgggcggggcgtcaggtacttaattcgcgcctggagggaccgaaggtgccgagggctccgcatcgcaaccatggcgctgcgctggggcatcgtgtctgtcggcctcatctccagcgacttcacagccgtgctgcagacgctgcctcgctctgagcaccaggtctgcccgccctccggattctggggaagaggaggcggggggcgggactccagagtctaaaggaggagggagtttagggttcaggactagtgagtgggtcgtcattgcagtgaaacgtctgtttccttgctacctccttctccatctctgttctgcaaacctgtggggaaaagaaagatcagattgttactgtgtctacgtagaaaatgaagacataagaaactccattttgaactgtactaagaaaaattgtttctgctttgagatgctattaacctgtaactttagccccaaccgtgtgctcacagaaacatgtcctgtattgaatcaaagtttaatggatttagggctttgcaggatgtgccttgttaacaatatgtttgcaggcagtatgcttggtaaaagtcatcgccattctccattctctattaaccaggggcacattgcactgcggaaagccgcagggacctctgcccaagaaagcctgggtattgtccagggtttccccccactgagaaagcctgagatatggcctcgtgggaaaggaagaccttacatcccctagcccgacaccagtaaagggtctgtgctgaggaggagtagtgaaagagggaggcctctctgcagttgagataagaggaaggcttctgtctcctgctctccctgggaatggactgtctcagtgtaaagcggaccattcccattccttctattctgagataggagaaaacctacctgtggctggaggcgagatatgctggcagtgatactgctctgttactctttgctacactgagatgtttgtgtaaagtgaaacataaatctagcctacgtgcacatccggtcacagcacctttccttgaacttattcatgatacagattccttttctacatagacacagtaacaatctgatctctctttcttttccccacacaaacctgagtgtcttgaggtttggaaaggccttgatgtaagctactatgaagataatttcaatattgggggatttaataacggctttcccccagatctctctttcccagggcccaaatgtccagcccccgtcatctcttcccccaggaccacgtctccccttcccctggccagagcctcctcctttgcctcccttccacccagtttccacgcctgcctcagcccctcaaatccgattcttgtgcccctccaggtggtggcggtggcggcccgcgatctgagccgtgcgaaggagtttgcacagaaacacgacatccccaaggcctacggctcctatgaggagctggccaaggacccgagcgtgggtgagtggcgagggcgatgggggtgctggccgccgcccctggagcggtgccccctggctgccccctgggagatgcaaggctcctcaggatggtccaatccctttgggttccataaagacctttggctgggaggagaactataaaacgggcttggtctgggactggctgtctagtaggtgttaaactacacttagcgttcgagaccagcctcggcaacgtagcaagacccaatctctacaaaaaataacaataaaaataaattagccaggtatggtggcacgcacctgtaatcccagctactggggaggc[136 bp omitted]cctgtaatcctagcactttgggaggccaaggcgggcagatcatgaggtccggagatggagaccatcctggctaatacggtgaaaccgcatctccactaaaaatacaaaaaattagccgggcatggtggcgggcgcctgtagtcccagctactcgggaggc[131 bp omitted]ttaaaaaagagagcgagaatggcgagaggtaacagccccttcctaaggacagctccctaagggagacaggggtgtgaccgaccacctggtccctgggtgctagggcggggcctcgaagttgtgggcggagctcggctgtctgggtgggcggggctgctgacctcttgacctactcccaccctagaggtggcctacattggcacccagcacccccagcacaaggcggcggtgatgctgtgcttggcggcgggcaaggccgttctgtgcgagaagcccacgggcgtgaacgcggcggaagttcgcgagatggtcgcggaggcccgatcccgagccctcttccttatggaggtgagggcagaggagcccttccaatatccagcgtaaaagtgcttgccattaaatatggttgccagtgcgcggacggggtcagtgcatttgccaggatgtatctgaatctccttggcagcatctattaccgtgaaagccattgcttttggcccttagcaaacacggcaaggcttactgaaattgcttgga[136 bp omitted]cccatctcttctaaaaatacaaaaaattagctgggcgtggtggcgggcgcctgtagtcccagctacttgggaggctgaggcaggagaatggcgtgaacccgggaggcggagcttgcagtcagccaagattgcgccactgcactccagcctgggcaacacagtgagactccgtctcaaacaagaaaaaaaacaaacaaaaaaaaaaacaagaaaaagatgccaagagtgaaagtggcatagaatggcaatggcttagtttgggtggggttccaggtagaggttgaaaggaccaaggaaccccctacaaacctgcagtgcagtggcgcgatctcggctcactgcaacctccacctcccaggttaaagcgattctcctgcctc[225 bp omitted]cttagccttgtaaagtcacacattcacagactccggggatcatcaggtcgtggatatctttgggggcaccagtagcctactgccacaacacccaggctcagagcctgcgcagagcctgcccccggctccccagtgccctcaggcctgtgttcacgctcctctcgactgctccgagcccgggcggacctcggccacatccgtcctgccccgcccttcccccgtgag[269 bp omitted]gtctaacacagtgaaaccccgcctctactaaaaatacaaaaaattagccgggcgtggtggcgggcgcctgtagtcccagctactcgggaggctgaggcaggagaatggcgtgaacccgggaggcggaggttgcagtgagctaagatcccgacactgcactccagcctggacgacaagagcgagactgtctttaaaaaaaaaaaaaaaaaaaaaagaaattgctggagtgcagccttgggacctttgcccattctcccggctctcccgtgacattctttctctgggctctttgcctagtccacggagcttccgtctcccctggaatgtcacctcctcagggtgtcaccgtcccggctgtcctgcgtgaaggaccctccattttatttgtgtccttggtattcctttgttcatcccttggttgcctgttctctgtctctctagactgggtgctccaagaggtagaactctggtttttgttgtcattgttgttgtttttgagacagagtcttgctctgtcgccaggctggagtgcaatggcgtgatctcggctcactgcaacctccgctgcccggctttaagtgattctcctgcctcagcctcccgagtagctgagattacaggcatgcaccaccacgcccggctaatttttgtatttgtagtagagacggggttttgctatgttgtccaggctggtctggaacttctgacctcaggtgatccgcccgccttggcctcccaaagcgctggggttacaggcatgagccacagcgcccagcccccagttccaggagtttttttttgttgttgtcattttgcatttttctacatagatgatgtcatctatgaacaaagagttttatttctaccttctgtatctatatgcctcctttaaggagtttcactaggagatgcacacgtaactcttaaacccactggcctgcatgctctatacctacatctaatctcttcttataaggacaccagtcatattgtcatatt[132 bp omitted]ttctcctgcctcagcttcccgagtagctgggactacaggcgtgcgccatcacgcccagctaaaattttttgtatttttaatagagacggggtttcaccgtgttggccaggctggtctcttgg[132 bp omitted]ggccacaacagttgctttcagaggtactagggagttaaggcttcaacacgtgaattgtgtttggcagggcagaagcgagagggagagagacacaattcatcccataacatggggagactggggcaatggtccagatgaaaaagaacaaaagtcaatagggcacggtggctcatgcctgtaatctcagcactttgggaggctgaggtgggaggactgcttgagcccaggagttcgagaccagcctgggcgacatagtgagaccctatctctattcaaaaaaaaaagaaaaagaagaaaagtcaagagggtcaggagcaagagggatacaacctggggactgatgggctgtgtttggagactgggttgcagtgggtatccccctatgattgggaccccagaagggattagaactggttggttaactcctttccttgtggtctgcaggccatctggacccgcttctttcctgcctccgaggctctgaggtctgttttggcccagggaactctaggagacctccgggtggctcgggcagaatttgggaagaatctcatccacgttccccgggccgtagaccgggcccaggctgggggggccctgctggacatcggcatctactgtgtccagttcacctccatggtctttggagggcagaagccagagaagatttctgtcgtgggaaggcgtcatgaaacaggtaccatctatcctggaatatttcatggtgatgggaatgattctgtctctctgggagcactgaactgaggacaagtctccaagtcaatgagaattagatcagacacctagaggaacaactttccatgaagccagagaggatcagagtcaagactgcaggtgggcactctcctgggactttgctgtgtgatcttagccagcagacttaacatctctgaatcttaattactttactggtaaagtgtcactaatagggttgtcatgggagttaatgaagtaactgctgaggcaaatggcagttaataaatataaaattattattttttgaagttgtctcagtgaatctttgctacaaaaaagactaccccacttggccaggcgtggtggctcacgcctgtaattccagcactttgggaggccgaggtggccagatcacctgaggtcaggagttggagaccaccctggccaatatgatgaaaccccatctctactaaaaatacaaaaattagctaggcattgcggcaggcacctgtaatcccagctatctgggaggctgaggcaggagaatcacttgaacccagggggcggaggttgcagtgagctgagatggcgtcactgtactctagcctgggcgacagagtgagactccatctcaaaaaaaaaaaaagctgccccactttgcagaagaggcccttgccttggcttccactcagctggaaagtatccaagagtgcctgagccacccagatgtgatgcccttcatctttgacctttaaccccaaggagcaagaggcagttcatgcttcattaaagttacattcagccgcaaaa[137 bp omitted]catggtaaaaccctgtctctacgaaaagtgcaaaaaaaattagttgggcgtggtggtgtgcacctatagtccggctactctggaaggtgaggtgggaggatcaattgagcctgggaggcagaggtggcagtgaactgagatggtgccactgcattccagcctggggaacagagccagaccctgtctcctttttgtggagaacagagtctcgctatattgcccaggcaggtctcgaactcctgggctcaagctatcctcccgcctctgcctccccgagagctgggattacaggtgtggccaccgcccccggcaagccagaccctgtctcaaaaaaaaaaaaaaacttagtgacttcaaatagcaatcatttattagcttgtgattctgtgcattggcaaattggggctgggctctgcttgatggttcttctgctggtcttattcctgcagctgcagtcagttggctgttcagctgggactggacagtctggtaggcttcatttatatcttacaggtggcaggcaactgtctgggaagccttgattctcctccacctggcctctccagctggctagataccattcatatcgtggtgtgagaattcctgatgtgcaagcacttttcaggcctctaattacaccatatttgctactggcccattggccaaagcaagttacatggccagctcagttttcagagatgggcaaatagactgtaatttttgtttttttttagatagtatctcactttgccacccagggtagaatatagtggtgtgatcttggcacactgcagcgtcaacctcctaaattcaagcgattctcctccgtaagacccccaagtagctgggcatacagatgtgggccaccacgcctggctatgtttgtttgttttttgtagagatggagtttccccatgttgcccaggctggtctcgacctcctgggctcaagcaatacacacatttggcctcccaaagtgctggggattacaggcatgaaccaccggctttttttttttttttttgagacggggtctcactctgtcacttaggctgagtgcagtggcacaatcattgctcactgcaaccttgacctcccaggctccagggatcctccacctcagcctcctgagtagctaggatcacaggcacaagccaccacacccaactaaattttttattttttgtagagacaaggtctcactatgttgcccaggctggtcttgaactcctggactcaagggatcctcctgcctccacctcccaaagtgctgagattataggtgtgagtcactgtgcacagccaagactgta[136 bp omitted]ctgcctcagcctcccgagtagctgggacgacaggactacaccacgcctggctaattttttgtatctttagtagagacagggtttcaccg[139 bp omitted]cttgcccaaggttccacaggcaggatttggggcctgtgcagtctcagagactctgccctgagagaccctgccctgacccaggacttccctccaggtgtggatgacactgtcacggtgctcctgcagtacccaggggaggtccatggcagcttcacctgcagcatcaccgtgcagctctccaacacggcctccgtgagcggcaccaagggcatggtacaggtgaggcatggcgggcccaagcgctggggatcgtgcccctaaaataggagggggacaaatggcctctggagctagatgagagcttaaccagccaatttcacatcattgctaaagagttcctccttaaccaagccaagaggtgggttctgggcctctaggctctccttacttaggatgaacctattgctctgtcaaatattcttgggcctggctggcacggtggctcacgtctgtaatcccagcactttgggaggccaaggcaggcagatcacctgaggtcaggagttccagaccagcctggacaacatggtgaaacgccatctctactaaaaatacaaaaattagctgggtgtggtggtgggcgcctgtaatcccagctactagggaggctgaggcaggagaattgcttgaatccggaagatggaggttgcagtgagttgagattacgccattacattccagcctgggtgataagagcaaaactccatctcaaaaaaaaaaatatatatatatatatgtatccttgggcctggccggcacggtggtcacacctataatcccagcactttggaggctgaagctggtggatcacttgagccctggaggtcgaggctgcagtgagctgtgattgtgccactggactccagcctgagtgacagagtgagatcctgtctcaaatatctatctttagtcctgaggagaagccagttattatcaaccatgcttagtgggcagttgtgaatttcggaagtgcatccgggggaggatctgggtgttaccaaaggtcagcttaactggtcttcctggggccttgttgctagaaaaaaaaaaaaccctattttatagccaggcatggtgacttacacctgtaatcccagcgtgattgggaggccaaggcaggcagatcacttgagctcaggaattcaagactggcctggccaacatggtgaaaccccgtctctactaaaaaaaacatacaggctgggcgcggtggctcacacctgtaatcccagcactttggcagcccagagcgggtggatcacctgaagtcaggtatttgtgaccagcctgaccaacatgatgaaaccctgtctctactaaaaatgcaaaaattagccaagtgtggtggtgcatgcctgtaatcccagctactcaggaggctgaggcaggagaattgcctgaacccgagaggcggaggttgcagtgacccgagatcgagccattgcactccaggctgggcaacaagagcgaaactccgtctcacaaaaaaaaaaaaaaaaattagtcaggcatggtagtgggcacctgtaatcccagctactcgggaggctgaggcag[136 bp omitted]catggttcacagacacacaaagataagccctcctctctagaccttaagaacaccttgtttctaagctcctaaggttagggagaggtttgctcctggggagacagacaggatttttgtgtcacatcagcgttgctaaggaacaaacttctagcaactagaaatgaaggagggtccaaagctccccggggatggacagggcaagctcttagccaccaggttcaagagggaggcccctgtgcaccacctggcatgttcctggaggcagcctcagcagcaccgttggtgaaggcagcagtgccacttcttctctccctccagctcctcaacccctgctggtgcccgaccgagctggtggtgaagggggagcataaggagttcccgctgcccccagtcccaaaggactgcaattttgacaacggggcaggcatgagttatgaggccaagcacgtctgggagtgcctacgcaagggtaaggatatggatgcggggcaggcgccaggcctggtagggggatgttgggcccctccccacctgctctgtcaccctgctgtttagaactacatctcccaggaggttgcagtgagccgagattgcaccactgcactccagcctgggcaacggaacaagactctcactccaaaaaaagaactatatctctcaggaacccctgcagcatccatctgcctgaaccatgtatattgtgccacatggaattctgggaattgtagttctttgggtcttgggcgcgtgggtaggaggggtccctaactacactctccccacaggtatgaaggaaagtcctgtgattcccctgtcggaaagtgagctcctggctgacatccttgaagaggtgaggaaggccattggagtcaccttcccccaagacaaacgctgatgtatccccgaataaataaagacatcttacatcttcgtggtagtggtttggcagaagctggagaacccagtat[132 bp omitted]tgaaaccccatctctactaaaaatacaaaattagccgggcataatgacgcatgcctgtaatcccagctacttgggaggctgaggcgggagaatcacttgaacctgggaggcggaggttgcggtgagccgagatcgtgccattgcactccagcctgggcaacaagagcgaaactctatctcaaagaaaaaaaaaagaaagaaaaaaaaaataattcgggcagaatgatgagggaaggccgggcatggtggctcacacctgtaatctcagcacttcgagaggccaaggtgggagacttgcttgaggccaggatttcgagaccagcctgggtaacatgacaggaccttgtctctacaaaaaataaaaatattatccaggcatggtggcccgcacctgtagtcccacctacttgggaggctgaagtgggaggactgcttgagtccaggaggttgaaactgccgtgagtcatgattgcaccactgcacttcagcctgggtgacagagacagacccagtctcaaaaaaaaaagaatgattttggagagggaggaatgtgcagggtcaggaccacattcccagaagctcctggcacagacacctgtgggaagatccaccgtttgcctgtcacggcctctctggggtttgaccctcattgccttggagtgacttttgcaaaacaacttgatttctcacctcaaaaatcagtctttttctggactcctgaaagccacccagcttttgttcttgttgctcttcctgcctgtaattgtctctccttgaattcaatatagtagtcaggctgttcctttggacagtgtcagaaacacaactcagaatgtctccacaaggccaggcatgggggtcacagcactttgggaggctgagacaggaggaccacgtgaggccaggagtttgagaccaggctgggcaacatagtgagaccccgtctcttaaaaaaaaaaaaaaaaaaaagcctgcacaggaatggaatgcttggtaattaaagccttcagggcagggcaggcatcagcccaggactctgtttttctctatctctttgactttccttggcatgggttttaatggcagcagtgggccatctggtacagccggggccatcatgctggctgctgccgggagggcacagaaaagagatggacagaccctcacccctgcagtccgctgcccggggggctgcccccacagagctgggccgggttttgtgccaggtgagggggagctccaggccgtctctgagtgccagggtcacaggaggagctcacagccatgttgcttcggcccccgatgccagcccagtcctagtaaggacccagagctcccacccctggctgcacatgggtacagtcaggtgccatgcttcatggagctggcaggagctggggacacacgggagccctgccccttccaagatcaggagggtgagagctccgcaggagcaactgcagctgcccaggccgtggctgcaatccagacacccccgtgctattgggagctgggagtagacaggagccacacccagttgtgtctatggatgtggatgtgggcctcctgctctacagagcaggcaggagccccgccccccaaggcacagctgcagcccccaaaccggggctgtagacccaggcatccctgcactcctgagaggcctggaaaggcctcccttgtccttgtaggctcagaggtgcctgctaccactgcctggcctctccccactccctctcttgctctgatctcagagtggggttggggctgagcccaggtgctgacattgtccaccaggtgtgcacatgctcagggtagtgctaacatgtgcgagcactctgccaccttggcctcctccagacattgggtgccgaggagcacaagaggggaacctgagggggtgctaagggtggctgggtgctggcgtgaaggtgccccttggtgccagcagcctgggcaccatggatggccatgggaggcagacaggctcctgggcagaagggggcaggtccccagtgaagccccaccttcaggccaggcaggtttgaagcctgggggccagggtgccagtcctgtggactgaagggggaactcatggtgctttttcctgggcccacccatcctgccatggaccaataagcatgcacttcccctctgtgaggcccataaaagccccaggctcagccagagccagcagaggacagagagacaacaggatgaccagctacagagcggagctaccctctccagggctcctctctactgagagctgagcacttggtgggacaacctgcctacagagaagaactacccactgcgggtctcccctgagctgttgtaatactcaataaagctcctgtttgtctttttcacccttccgttgtctgcatacctcattcttcctggacacaggacaagaactagggcaaaggcaccaccagccacagaggtttctggccagaaaagcaacaccccaaagatcctgtaacagtttcaccagttaagtgtaggcctgggcactggagccagatggtgcctgtgacctcaggaaactaatagcgtgtgggtaggaagtgtccctaaatacactctcccccagcctctgtttgtctcttcatcagtaaaggggtact[226 bp omitted]ctgaggcaggagaatggcatgaacctgggagtcggagtttgctgtgagccaagatcacgccactgcactccagcctgggtgacacagtgagactccatctcaaaaaaaaaaaaaaaatgagaaggtgactgatatgtagtttggatctgagtccctgcccaaatcccatcttgaaatttaatttccagttttggaggcagggcctggtacaaggtgattggctcatgggggtggctttctcgtgaatggtttagcaccatcaccttggtatcaccctcacgacagtgagttctctcgagatctggtcatttgaaaatgtgtagtgttgggaatagacccccaaaatctggccataaactggccccaaaactggccataaacaaaatctctgcagcactgtgacatgtttgtgatggccatgacgcccatgccggaaggctgtgggtttactggaatgagggcaaggaatccctggccgacccagggtggaaaactgcttcaaggcgttcttaaaccacaaaaaatagcatgactgatctgtgccttcaggacatgttcctgctgcagataactagccagagcccatccctttatttcggcccatccctttgtttcccataaggaatactttcagttaatctataatctgtagaaacaatgcttatcactggcttactgtcaaaaaatctctgttcgaggctctcagctctgaaggctgtgagacccctgatttcccactccacacctctatatttctgtgtgtgtgtctttaattcctctagcgccactgggttagggtctccccaaccgagctggtcttggcagtgtagcaccttccccactctctcctgctccttctcccgccttgtgagatgcttgttcccccttcaccttctgccatgactggaagcttcctgaggcctccccagaagcagaagcctgtgttacacttgctgtacacagtctgcagaaccatgagccaattaaacctcatttttttttttttttttgagatgaagtctcactctgtggcccagggtggagtgcagtggcacgatctcacctcaccgcaacctctgcttcccaggttcaagtgattcttttgcttagcctcccaagtagctaggattacaggtgtgcaccactgcacacggctaatttttttttgtcttgaactcctgacgttaggtaacctgcctgccttggcaaatccaaagtactaggattacaggtgtgagccactgtgcccagcaaacctcttttgtttataaattacccagcctctgtcaggtgcagtggctcatgcctgtaatttgagcattttgggaagctgaggtgggcagatcacttgaggtcaagagttcaagaccaacctggccaacatggtgaaatcccgtctctactaaaaatacaaaaattaggccgggcacagtggctcacacctgtaatcccagcacttcgggaggccaaggcgggcagaccacctgagatcaggagttctagccagcttggccaacatggtgaaaccccatctctactaaaaatacaaaaatcacctgggcatggtggtgcatgcctgtaatcccagctactcgggaggctgagacagcagagatctcttgaacctgggaggcggaggttgcagtgagccaagattgcaccactccactccagcctgggtgaaagaaaaaagaaattaatgggtggcttagctgggtggttccagctcagggtctccctgaaaattgcagtcatgacatcagtcaggactatcttcacctgaaagcttgactggggctgaagaatccctttccaaaatgattaactcacctggccagaggacttggtttcctgccacccgtgtttcgccagagtatgactgcttgagtgtcctcactgtcacacgtgtccgtgcaaagagaccacctaacagactttgtgtgagcaacaaggctgtttatttcacctgggtgcaggtgggctgagtctgaaaagggagtcagcaaagggtggtgggattatcattagttcttataggtttgggataggtgtacaaattacattctcaagagtggggagaatattgcaaagtaccttcttaagtggggtggaggggagaatatatcatatcagttagagtggggcaggaacaaatcaccatggtggaatgtcatcagttaaggctattttcacttcttttgtggatcttcagttgcttccggccatctggatgtgtacgtgcaggtcacaggggatatgacggcttagcttgggctcagaggcctgacactcaccacatggcagctggctttccttaaaggaagtgatctgaaagggaacaaggtggaagctgtagtggcttttctgacctgtcctgtgaaatcacactctgtcatttccacaatatcctcttggtcacactgtttagccctattgagtgtgggcagagaccacacagcagcatgaatacctggaggtgtgactcctcaggtgccatcttggatgtg[143 bp omitted]ggcaaaagcctatctctaataaaaatatcaaaattagcagggcgttgtcacacgcctatagtcccagctactcaggaggctgaggcaggagaatcacttgaacccggaggcggaggttgcagtgaactgagatcacaccactgcactccagcctggcgacagagcaagactccgtctcaaaaaacaaaacaaagcaaaacaaaacaaaacacacaaaaaagagttttagtcaggcacagtgacgcatgcctgtagtcccagcactgtgggaaactgaggcaggtggctcacttgagcccaggggtttgagaccagcctgggcaacatggcaaaaccctctccctacaaaacatacaaaattagcagtgcatagtggcacacacgtgtagtcccagctactccagaagctgaggtgggaggatcccttgagcccaggaggtcgaggtggcagtgagccacagttgtgtcattgcactccagcctggacgacagagggagatcctgtctcaaaataaataaataaaaataaaaataaacagttttgacttcacaactagctaaaaagtgtattccctcactcagtgactgtactgttcagaggtgtatacctgcattaaaagccctttccttccttctctgtaactggagtagggaagggctatctcattggactggagtaacacacacagataaagccggatgcaaagttaacaggaaacactatttctctcaaggatacgctttgtttgttttttttttgagatgaagtctcgctctgtcacccgaggtggagtgcaatggcacgatctctgctcactgcagcctctgcctcctgggttcaagtgattctctggcctcagcctcccaagtagctgggattacaggagcacaccagtacgcccagctaatttttgtatttttagtagagacagggtttcaccatgttggccaggctggtctcaaactcctgacctcaggtgatctgcctgtcttggcctcccaaagtggtgggatttcaggtgtgagccaccacgctggccaaggacatggtttcttacagagactttgttctctaaattcataaattgttggaaattctatcagtaaaaatgaaacatccgagtcttgctgacaggatctaatccacttgatacagagtagcagccttgatttccaaagcaggtgcacagcttcagataaagggtttctggatgcaacatttcacatgtaccttcttgtttccagcgattcaggacactggtttcacttcacagtcctgatccaatgttgaccttgctttgctctaagctatcatttggttgtcacctaagctctaccctccccctttatcttggctttttcttttcttttttctttttgagacaggctcttcctctgtcacccagtctgattgcagtgatgcaattgatcacagctcacggcagccgggacctcccaagctcaaacaatcttcccacctcagcctcccaagtagctgggactacaggcacgcaccaccacatccagctaattttcttttttttctgcttccttttctttttgtttttttttagatagaggcttgctctgttgcccaggctggggtgcagtggcacgatcttggctcactgcaacctctgcctcttgggttcaagcgattctcctgcctcagcctcccaagcagctgggactgcaggcacgcgccaccactcccagctaatttttttgtatttttagtggagacggggtttcgccatgttggctaggctggtcacaaactcctgacctcagatgatacacccacttcggcctcccacacagctggtattacaggtgtgagctaccacgcccggccccccctcctttcttttgttttttagttgacacagggtctcaccatggtacagcccaggctggtcctgaactcctggcttcaggtgatcctcctgccttggcctcccaaagtgctgggactataggaatgagccatcacacctggcccctttcttcaattttcaaaacaaactgatccttcaaggtcaagaggaaatacctcctctgagaagtcttctctgaatgtcagaggcagacaatgtctgatttctgcatgctccccaacattcaatcatacagttattgaataacacattttgagagataactatgaatcaagtaacatgctggtttctgggagaattgaggacaaattaaccttgtggaaattttgggtggatgaaaaaaaccaacatgaaattaaaacactgcacacatttacagctgtgagaagcattacacatcctgggtgctatgcgagctttttttttttttttttttttttttgagttggagtttccctcttgttactgaggctggagtgcaaggtcacgatctcagctcactgcaacctctgcctccagattcaaacgattcccctgcctcagctcccgagtagctgggactacaggtgcctgccaccacacctggctaatttagaatttttagtagggatagggtttcaccgtgttggccaggctggtctcaaactcctgacctcaggtgatctacccatctcggcctcccaaagtgctgggattacagaagtgagccactgagcccaaccaggagctttttcgagaaagaaggaagtccaagagatcttcctgacaccctagtctgactctgccctttgcctgctcaaaatttccccatgcttcccagcggccttctggacatagatcaagtcccttctctgacaggcccaaaccctttatcatctgatcctagctcatttttctgagttttccttagttgctattattttctgtctaaagtgacatgtcataatattcataaagcacacaagtctt[142 bp omitted]gaaaccccatctttactaaaaatacaaaattagctgggcgtggtgtcgcatgcctgcaattccagctacttgggaggctgaggcaggagaattgcttgaacccggaggcagaggttgcagtaagccgagatcgtgccattgcactccatcctgggcaacaagagcaaaactccgtctcaaaataataataataataataataataataataataataatgtgtatacccatgtaaacaccattcagataaaaatatggcatatttggggcacccggggagtgtctcttgtggcccctcccctccataccctgctgatctatcagcacagattagtttctgccactttttaaacttcatattccttttctttttacacaaacacaaacattcgagtcatgactgggtggggtggctcaagcctgtaatctcagcactttgggaggccaaggtgcgaggatcgcttgagtctgggagttcagagaccagcctgggcaacatagagagacctcatctccacataaaaagttttaaaaattaaccaggggcggtgtagtcccagctactcaggaggctgaggtgggaggcttcagcccgggaattccagactgcagtgagccatgattgggccactgcactccagcctgggcaacacagtgagaccctgtctcaaaaaaaaaaaaaaaaaaaacaggaaaaaacaaacaaacagaaaagcaggcctggcgcggtagctcatgcctgtaatcccagcgctttggaaggctgagacggggttatctcttgggctcacaagttagagacaagcctgggcgtgggctatattgctagatccaggtctctgcaaaaaacaaaaccactcagtttttagtcatctataacgtcctgcctggaagcatgctattttgggcctctgagcttttgcacttgctaattccttctgcgctggggagagctcaaaccctgcccgaaacttctaaaaatggtgcctggataaatgaaggcattagagctgcgattggacggacggctgttggacggcgccactgctggcacttatcgggagatgctcattggacagtcacgtgacgggaccaaacctcccgagggagcgaggcaggtgcggtcacgtgacccggcggcgctgcggggcagcggccattttgcggggcggccacgtgaaggacgcacgttcagcggggctctcacgtgacccgggcgcgctgcggccgcccgcgcggacccggcgagaggcggcggcgggagcggcggtgatggacgggtccggggagcagcccagaggcgggggtgaggcgggaggcagacgggcgggaggagggcgagccccctcgccggcccgtccgggatccttcctaccggcctggggctgtgcgatctccaagcactgaggggcagaaactcccggatcgggcgctgccagcctccagtcccctccgtcctcggaggttcctggctctctgatccccgtgtcccgatccctgcctctctggcgctctcggaccctcgagaaccaggggatctcggaagccaagcccccgggcaggcccgggcttgtcgcccgcaccacttcctgcctctggcactggtgggaggggcgggtctcgcctctgccccctcaggccaggggtctggatgcatatagcgttcccctagcctctttccccggggagaatgtaggatacaggcccagcctcctggcctttctccatcagggactcagttgtctgggcccccccgtcactttatctgctagggtcccagaagtccagggtccccagctctgtcctccctcaggggccgtgagtctccacagtctcctgatcccctagaacccaagagtccaggtacctcttcccttcctttctcctctagggcccaccagctctgagcagatcatgaagacaggggcccttttgcttcaggggtgagtttgaggtctgattattgtggcacagatttgaggagtgacaccccgttctgattctgcaccctcactccatccccactctagtttcatccaggatcgagcagggcgaatggggggggaggcacccgagctggccctggacccggtgcctcaggatgcgtccaccaagaagctgagcgagtgtctcaagcgcatcggggacgaactggacagtaacatggagctgcagaggtgtgggcccctgaggacccagaagtccagccactgggctccttcaggacacaggactctcagccccgcattctcctcctcccctaagaactaggagtctgggccccacaactcagcgcaaacattccggactcccagccctcctctctgccaggatcttaaaaccctccttcagggagtcatttttcccaccttcctaaatgtctgtcttgtccccttcccttgtcccccgttggcctgttgcttttcatttcagcctggcttggggctcagtctccttatctttagtgtgcggtggatgcgggaattttccaccatcagcctgatgcctgctccccggcactggttctcctctctcctgcaggatgattgccgccgtggacacagactccccccgagaggtctttttccgagtggcagctgacatgttttctgacggcaacttcaactggggccgggttgtcgcccttttctactttgccagcaaactggtgctcaaggtgggcagctgcagggcagtgagcccagggatgctccccctcagatctgtgaggacctggggatcgtggtatcaaccccctgcagtggcccagtgaccacagagggcatggagagagatggctgtgcactgggtgtctgctccttcttttattcattcaacaagcatttactggacctgctatgtgccaggcctatacctggcacctgggacacagcactgtacaaagcaggctacatccctgctctcagggagttcacgtgcaggggtgaagtaaagtgggcagtgtgatttagcagagtggtcaggaaagatttctattttttttttttttttttttgagatggagttttgctcttgttgcccaggcttgagtgcaatggcatgatcttggttcactgcaacctctgcctcccaggttcaagcgattctcctgcctcagcttcctgagtagctgggattatgggtgtgcaccattatccctggctttttttttttttttttttttttttgtatttttagtagagacgggtttcaccatgttggtcaggctggtcttgaactcctgacctcaagtgatccacctgccttggcctcccaaagtgctgggattacaggcatgagccaccgcaacaagccaggaaagacttctaagggcaggtgacatcaaagagcaggtgacattaaagccaaagctagaatgataagaagcatgcagtgatctatagtgatcggggggaagaggcatctggtagagggaacagcaagtgcaaaggccctgaggtaggaccaagcctcatcttttgacagtagggaggaggccagtgctgttggaacagagtgaactggggagagggtgggaaaggaaggcacagttgggcaggg[138 bp omitted]cctctgcctcccgggttcaagtgactctcatgctttagcctcccaagtagctagaattacaggcacacaccaccatgcctggctagtttttgtatttttagtagagacggagtttcgccat[132 bp omitted]gagtgattggctggttttaaatacggaagcgacaagacctgatttataactttaagagattattctagcaagtatagatgccccttgacttgcaatggtgttacatcctagtaatcccatcataaattgaaaataacataagttgaaaatgcattcaatgccccgataaacccatagtaaggtcaaaattgtaagtcaaaccgtcataagttggggactgtctgtatagcaaaatgttaattgtagaatctaattataggtggcggctatatggcttttaactgtgaaattcttttaacttttcattatgaagattctcataagaaaatgtggtgggggtggtggtgaaatgctcctggctgttgttggccaaaagagatcatgaggcacaagggcagaagcgaggatcctggagaggtggcacctgtcatagtcttgctgaaagatgacaagccctggtggtagcagcagaggtgcggggggggcatttttttttttaagaggtagggtcttgctctgttggccaggctggagtgcagtagtgatcatagctcactgcagcctcaaaccgctggggtcaagcagttctctcgcctcagtctccagagtagctgagactacaggagcatgccaccacgccccactaactgttgcattagtctttttctatagagacggggtctcgctatgttgtccaggctggtctccaacagggagggatatttctttttggaagatttttttttttttttttttttttttttgatacagggtctcgctctgttaccaaggctggaatgcagtggcatgaccttggctcactgcagtctccacctcctgggttcaagcaattctacctcagcctcctgagaagctgggattacaggctctccccaccacaccagcaaatgggagggatatttctttctttctttcttttttttttttcctgagacggagtctctctcggttgcacccaggctggagtgcagtggcgcgatctcagctcactgcaacctccacctcctgggtttaagcgattctcttgcctcagtctcccgagtagcttgggattacaggcgtccgccaccacacccagctaatttttgcatttttagtagagatggggtttcaccatgtt[136 bp omitted]ggggcctgaacgtccgagatgaggggaatagcagtgcaggtgatggtggcaccacctacagagcggggatgatagaatagaagtggccagataaaggctgcaggagaagtcttgggagttgggagagcaggtcggggtccatg[222 bp omitted]gaggcagaagaatggcgtgaactgggaggcggagtttgcagtgagctgagattgcaccactgcactccagcctggagcgacagagtgagactccgtctcaaaaaaaaaaaaaaaaaaaaaagaaaagtcctctctggggaagtgacatttgccctgagagctgaagggtaagaatttgcttcgtcgaggcctgtttaggcggaaacaggagtacatgaagaagtcccgaggcaggaagaatttgatgggaatttaaaaaattaaaaaaaaaaaaaaaaatggggctgggcatggtggctcacacctgtaatcccggcactttgggaggctgaggcatgcggatcacctaaggccaggagtttgagaccagcctgaccaacatggtgaaaccttgtctgcactaaaaattcaaaaaaaaaaaaaaaaatagcccggtgtggtggcggatgcctgtaataccagctgcttaggaggctcaggcaggaggatcacttaaatctgggaggcggaggttgcaatgagccgagactgcactattgtactccagcctgggcaacaagatcaaaactctatctcaaaaaaaaaaaaaaaaattagccaggcatgttggcaggcacctgtaatcccaaccctttgggaggctggggcaggagaattgcttgaacccagaaggcaaagctttcagtgagccgagattgcgccactgcactccatcctgggtgtcagagcaagactccatcttaaaaaaaaaaaatggaagcagctcagcgaggcacaaaacaggaagtggaaaggtggagtgaggtcaggccaaagcctgcacacagggcttgtgggctgcactgtgccttcgggtcttcatcctgagggtactggggagccacagaaggctcaggggtggggcagttgagagtaacattatcttgtttacaattttattttttttatttatttattttttgagacggattcttgctctattgtccaggctggcgtgaaatggcgtgatctgggctcactgcaacctctgcctcctgggttcaagcgattcacctgcctcagcatcccaaggagctgggattacaggtgcctgccaccacacccagctaatttttgtatttatttattttgagatggagttttgctcttgttgcccaggctggagtgcaatggcgcaacctcggctcactgcaacctccgcctcccgggttcaagcaattctcctgcctcagactcccaagtagctgggattacaggcatgtgccaccacgcccggctaattttgtatttttagtagagatggcattactccgtattggtcaggctggtcttgaactcccgacctcaagtgatccgcctgccttggcctcccaaagtgctgggattacaggcatgagccgccgcacctggccatgtttacaatttttgaagccgacttcaattgtgggtggcagaaatctttgaggggaggcaaagaattgacaaaggaggtttggggccactatctccaggcagtggggacaaggttcagtccctaacgcccactccactccccacaggccctgtgcaccaaggtgccggaactgatcagaaccatcatgggctggacattggacttcctccgggagcggctgttgggctggatccaagaccagggtggttgggtgagactcctcaagcctcctcacccccaccaccgcgccctcaccaccgcccctgccccaccgtccctgccccccgccactcctctgggaccctgggccttctggagcaggtcacagtggtgccctctccccatcttcagatcatcagatgtggtctataatgcgttttccttacgtgtctgatcaatccccgattcatctaccctgctgacctcccagtgacccctgacctcactgtgaccttgacttgattagtgccttctgccctccctggagcctccactgcctctggaattgctcaagttcattgatgaccctctgaccctagctctttcctttttttttttttccccactgagaaggggtctcgctatgttgcccaggttggtctcgaactcctggcctcaagcgatcctcccgcctcagcctctcaaagtgctgggattacaggtgtgagccaccatgcctggcctgagtccagctctttaatgcccgttcatctcagtcccctgcccgcaatcctgccttctggcctcctccgtccctgatcccgcctctgcctgcccaggggctgcccctggccgagtcactgaagcgactgatgtccctgtctccaggacggcctcctctcctactttgggacgcccacgtggcagaccgtgaccatctttgtggcgggagtgctcaccgcctcactcaccatctggaagaagatgggctgaggcccccagctgccttggactgtgtttttcctccataaattatggcatttttctgggaggggtggggattgggggacgtgggcatttttcttacttttgtaattattggggggtgtggggaagagtggtcttgagggggtaataaacctccttcgggacacacttcggcatctgagtcactgggcctctgccccgctccccggcacgtcaggagagcaggccctgtccgctgccccacgccgggcccgccgtctgctggcctagagatacctgcttgggccactcagggacgtggggctctctgcactcacttgacatctttttctggggtgccctgtggggtctgtgggttagggatgagttggtcctgggcctgacctgcaggagctcacgggaaaggaaaagaagggagctcacgggaaaggaaaagggagctcacgggaaacgagggtgataggtggtacatctgtcgcagcccaggatgatctgtgcgggacagaggcagcggcctgtgaggcccaagcaggcgtgtgggtaagggaagaacagcacggccggctgcagagcaagcctcctcggcccggggaccacagcctggcgtgtcacacgtgggacctcaggaggccatacctttaccgagctggagaatgggagtggggggaggagggatgggaggaccagaggagcaggaagggctctggagcctggtggtgaggtcgctggagggtggcaggctgaggacaccagggcgagggcccacgggagaggcctcctgagctgggctgaggacagagaggaagggacctggctggcgactgagaggctggagggcagggcagaggaggaggaacctggtctggccccacagctgggtggggcccccctggagaggaactgccggaagaaggtgctgagctcagaggcccagtgaccttagacacaggcggagcgaagacaagggggctagaggatgtgggttctcagtcacagggtctctggcacccccctctgggtctttaccccctcccatctctgggtctctgtccccatgctctgggtctttgctttccgagcctctgttcccaccccacctttggccctctttctctgggcctctttccacccctggcacccagacctctggccccctctctctgggtctctgtccccccctctggatctctggccccccatctctctctgggtctgtcccccgaccctgagtttctgtctccctctctctgggtctctgtcctctctctggctgtcactctctcttgggtctctgtacctcccctctctctgggtctctttccctctccccggtctctgtcccccgcccccgggtccctgtccccgcccccccaggtctcagtcctccctagtctctgtccccttctctctgagtccctgtcccccctctctctgggtctctgtacccccttctctggatctctgtccccacctctctctggatctctgtcccccactctggatttctgtcccctcccgccgggtccctctgggtctctatcccccccacccctgggtctctgtacctccctgcctctgtccccccccacctctgtccccccctctctctgggtctcttttcccctccctctgggtctctgccctcctctctctaggtctgtccccctcccctctctctcagggtctctgtacccctctgtctccgggtctgttttcccctctctctgggtctctgtccccctctctctcagggtctctgtctgagtctctttttctctgggcctctgtctccccaccccacgttctctatggtcttcagatcctgtctctctcagcccctcctctccctccacctatgggccccaaggcccctctcggccgactaaaggtctctgggctgaggtatgacatttggtaaatgagtaactcgggccccacagtcaacggggtgctttggacggctgcccctcctccatggactcttcccagagaccccaagtcaggggagagagaggggcagaggatcaatgagtgtacactgagccaccacccagagtgaggggacaatatggccacaggcaggatcccagaaaaaaaaaaattatgggaaccaaaaagacacggagacaaagcacacagccggcttccaacaaggggggaccttggggtagggggcccgatttgggtctgagccaggtctagttctgagggtcccaccaaaaaagtcggggagtgccaaggggatgaggtcagcgagtggccccacccccatccgtccccgcgggggccccttcccgcgctgagctcagcatgactcagcagtcgctgcctgcaacaaggaccccagataccggcctggcggggcatctgcagatcccctcggtcaggggctgccccgcctgggctgttcggagcagctcctctgtagggcagggcctgacctcaccccacaccccagtggcttcagctccctgcccagcgcacgggctgcctccatcagggcacttaagtagagtcaaggtttgcgccgactccgtctcccagaaatcaacgtggaccaggcccacttaaaaaatatgcattagtcgaagacagacgtctcgtccataggtccccagactgtttgtccacaacgcagggcttctctttgtgggcctgaaggagcacacgtcaggcaagacacgagggcaacttcagagacactgttcagggccacggagaattctcgaagtctgtgagttgtctccaaaacagcctccaggaaatgcaatcccagagacaccgcaaagctcaaaacagacttttcattcctccccatttccactcccagaaaaagcctgggcccctgaaagagctccaaggtatccccaaagtcccagcccatctttggagggttccagagggctgtccagggttccagaagtcaccctacctcatacaatgctcctcctgggcttcccgcactgggtgaaacccacggctccagaataactgccctttccaacttgcagagcacctcaagaacctaaagatttccccggggagggctccaaaatatagagagtttgcatcgtgaacccccacccctgtaaatcccaggactccagtccccgcaacactccatcttccagagatctccaggggtccagaaataacacctcacagccttccaagcttcccaaggatccggagactccttatctcgcagcgcaaacctcaggcaactacaggtcctccctgcacctttgaggtgcccctccccccactcaaggttccagaaaaatccatgccctcggaaaccccagaatcttactttcccgaggcaccccaggaccccagggtcatcagttcacagggctgttagtgctcccataaaactctagcctcccagagggaccccagcccccaccctcccgcccacgaacccctgcatttccagaatcagccccagggccccaacccccccaagcccccatttcacaacacgctggcgctacaggcgcgtgacttccccttgctttggggcggggggctgagactcctatgtgctccggattggtcaggcacggccttcggccccgcctcctgccaccgcagattggccgctagccctccccgagcgccctgcctccgagggccggcgcaccataaaagaagccgccctagccacgtcccctcgcagttcggcggtcccgcgggtctgtctcttgcttcaacagtgtttggacggaacagatccggggactctcttccagcctccgaccgccctccgatttcctctccgcttgcaacctccgggaccatcttctcggccatctcctgcttctgggacctgccagcaccgtttttgtggttagctccttcttgccaaccaaccatgagctcccagattcgtcagaattattccaccgacgtggaggcagccgtcaacagcctggtcaatttgtacctgcaggcctcctacacctacctctctctggtgagtccccaggacgcccctggccctaatttcctccagctgcgcacctccggccctcactgcacgcgccagccttctttgtgcggtcgggtaaacagagggcggagtccccttggcctcgcctcccgctaaccattgttgcctccatctcttcccgtagggcttctatttcgaccgcgatgatgtggctctggaaggcgtgagccacttcttccgcgaattggccgaggagaagcgcgagggctacgagcgtctcctgaagatgcaaaaccagcgtggcggccgcgctctcttccaggacatcaaggtaactagtgtgtgggtaatggactacatctcccagcaggccgtgcgcgcgaggagccttgatttgagggcgtaggtgtcgcgtgggcttctgggagattgagttcggtcttgtgagccctcttaaccgctggaaatagaggcgcacctcgtgcagtgcccacaacacgcggcagtccacaccgctgcgtggtcttagggacgtatagctgtaagagctaggacagggtgcggagagtgataaatacaagctgtcacatgtctttgtggcctgggcctctgacccccaacgactcttgggaaatgtaggtttagttctatgtgccgagtgtgtgtattctgagccatttctcccttctatatagaagccagctgaagatgagtggggtaaaaccccagacgccatgaaagctgccatggccctggagaaaaagctgaaccaggcccttttggatcttcatgccctgggttctgcccgcacggacccccatgtacgtacccgctgcatccatggctacccaaccatacccctcaagcctctgctccctttgggcaaatttccttcagagcctcatttcacacctgtcacattttaatctgcaactggctgctctctccccctcttttccagggattgggtttctaatttctccctcttctctctcagctctgtgacttcctggagactcacttcctagatgaggaagtgaagcttatcaagaagatgggtgaccacctgaccaacctccacaggctgggtggcccggaggctgggctgggcgagtatctcttcgaaaggctcactctcaagcacgactaagagccttctgagcccagcgacttctgaagggccccttgcaaagtaatagggcttctgcctaagcctctccctccagccaataggcagctttcttaactatcctaacaagccttggaccaaatggaaataaagctttttgatgcagctggtggttttgtgtgtggtgtggaagatgaggtgggatctgttctcataaagcttctggctgggttgggatgccagtgaaagaggagttggccccatctcccattttcttaactgtcctaagacaagaggctatctgggtagtgttgaacctgagggttctctgcttgcctggctgttaactgtccctcccagatggtagagatagactccagggagttgaattaagacctaggttggtatctagaaacagatgttaggtctcagccagaaacagccctatttaacgagtgattatggggccaggtgggtcgctcacctgatgtcaggagttcgagaccagcctgaccaacatgaagaaaccccgtctctactaaaatacaaaattagctgggtgtggtggctcatacctgtaatcccagctagtcaggaggttgaggtaggagaatcgcttgaatctgggaggcggaggttgcagtgagctgagatggcgtcattgcactccagcctgggcaaaaagagtggaactcccatctcaaacaaaaaacatgtctgcctcacggaagttgcggtgagctgagatggcgccactgtgctccagcttgggcaacagagtaagactctgtctcaaaaaagaaaaaagcctcaattctgggaggcagttggaattattaggccctttatatgggcacattgacgctattgctatgcaacttgcatggcaaccggggggctcactgaggtctttgctccagagtttaagagattatggcccgagcttgagtgatcccaatgtgaggcgcacactgagaggaactggccagtggagctgagcagccaggaacacgtgatgcccaagcaatgctggacaaggggtttagggttcatcacagaaatgggatgtgaaaccttgggccggattctccaaatgggaactgaagaagcttaaaacaggccttaaaaagcacttgctgtgtccaagctgcaaaactgctgtgtcagctctgactcttccccttctccttcccctgggtctggggcagggtggttcaagcctgtaatcccagcactttgggaggccaaggcaggacgatcacttgagcccaggaggttgagaccagcctaagcaacatagggagaccccccaagtctctctagaataagaggatgagctcagaccagggaaggggtggtactggggggacgtcacagccaggcccaccaagtgtcatgtctgaccacacctgggattcttaaatatagatgtatttttttcatctcatctccggacacactccaatcacacccctcctgccctcccctctcaactgcaaaccaagcggtgcagacacagcacagcacacatgaggggccctccctttcaccaaagctgaaggcagggcacagtttggggatggaagagcctcgaggtaaatgtgggggttctagaacccagtgacctcagttctggatcatgggaaagggatcagtatgcagtaacgtggtaaggttccagatctagaagccaggacctagaacctagtggtttcacagtgggcagagcagttgggaataagccaggttaggggtgggggaagacagccagctctgtcctctgcaggcggattccctggagggagatctcagatttagaaaggaagagtaggatctggtccagaaagggccagaaagacaggaaggcatctggactgagactgtgtgtcctccagaaggaatgagcagccaagtggttctaccacctcttgcttggccaaagtgtaggggatgacaggagccggatggagggatcctccaggcagagcctggctctgacatgccagggagggctagaacatccctcccagagccccacttctggagttgaaatggaggaccatctgctctcagttaccttcaaactctgaaagtgccccggctctggacttgatcgccccattcgcagggacaccacgtggtttccagaacttggtggcccgcatgccgggcctgagcgtggcctgctctgtatgctgtagaatttgtaagccacacggggggctctaaaagccccagacctgaaagcaccatgccaggtttcctaaaacctctggcaccaccgcagagtaatggcagattcctggcctctgggaagcggtccaggcccaggggactccagggcgctgattatgcatattctggagccagagaaaggcacggctttgtggattctggagtgcaggaacttggaaactggagctggagggggtggagtgtttggcggactgggtgggggcactgcggggccacacccagtgcagatctggagcgggggtttaggagcagcacccctctgcatcctctctctggagcagagaggcaggacaggcggggagtgtggtggggcggacttagttacgctcctcgcccagggagctggtggggctgaggggctcgctcggggtgctgagtgagctggaggtggccgtgtccacagagttgcgcttgctgccgctggtggaggaggtgcaggacgctcggcgcggccactctggtgcacggatgttgcgccggtccttggcggcctcctcgtcctcatcgtagcgctcgccgtcttcctccagcggcccgttccggggatcctcctcgtcctcactctggtgcgggctggagtgtcgtgacagcgagggcgacggtggcaccgaggctggccgtgggtagcggtacccctgggcctgcatacggcgatgtgggtgcaaaccagggtgagctgaggacctcacagtcccacccaggcatccagccacctctaggccttcccactccaggagggacccccaccccaccgaagcccagccctttagctcctggctaagcagaaatccagggtccactcaccgcatccgcctcgttgggctcgtaggtgaagtgctctggaaaggccttggacagcgccatgtggcgcgcagacatatagtactaggggaaaggaggagagggggcagaggatgtgagagccaggccccacccccaggcagatgatgggggtcttggccacaccctttatgcagatgagcacactgctgcaccccatacaaataatccatctatctgactccaccccttatgtagataagcagacctgtgaatggacagtttctgagccatacccctcaaacaggggccgaattctcaagtgagtctcctctttggccacacccttatgcaaatgagaacgcctgaccaatgttctttttttctttttaaacacggtcttgttctgttactctaggatggagtgcagtgggtttgaacaaggctcactgcagcctcaacctccggggctcaagcgaccctaccacctcagcctccccagtagctgggactacaggcacgcaccatcacgctcggctgatttttttttatttttagtaaaaataaaatgttgcccaggctggtctcttaactcctgagctcatgcgatccttcctgttaggcctcccaaagtgctgggattacaaccatgagccaccatcgcgatcggcctggttcattgcttaaagggacagcaactgttacaagtaggatgagaccctgcaccctgcaccaaagacccctagccaggagctgctgatttgccaggagaggataggaaagtgggggtcctacccggcctaggtatttccagtccagaaggtcggagaggcgctccgtgcggttccgctggatgatacgctgccgccggctctgctgacagaaactgtagaggaaggaggtgagctgcgagcaggaatcatccaggctgcggaaccgccggtcaagaatgtagatacctgtggaggccaggacccaggttcagaaaacatcctggggagatcttcatggtctccaggactctgtggcaccaggacccctcctctcccagcggcccgagagcccccccatttcctggtgcccctggtctccaagggtgcaagctcctccttcccaggatccaggagtcactgttctcaagcccccttccagaatcctcaggggcctgggcgctgaccgtaagctgaggggtctgcgatgtgttcctccatgaagcagccgaagccggagagattggtggagatactggggattcccataaccgtgcactcagctgcgggaaggcaggagagagacccacttagcttccctcatcgcctaccgtcttaatcgcaatagacgcctcaacaccgccctctactggcgcctgtaccaagtgccaggcgctgtgcggagcgtcgctgagcccccacaaccaggctgtgcatttccctatttctcagaggggacgctaagaggctcagaaaagagaattacttgctcttgctccaagatgcgggaaagtccatagttgggagataaggatgctaatttattgagcatcccaatatccatttgacttaactctcacaacctgtaggatcgggccaaggtccatcattctacttaattgtcacaacctgtaagatcctttcttgtgccagtatcttgtacggacttagtctattttgatggggggtaagataaggtctctcattattagtatccctgtgtacagagcatctagtacgtcttgtttaatacctttaacaaccttgagaaatagttcaaggaatgtattataattttttgatggatttttatgcttttttttttttctttcgagacagggtctcactctgtcacccaagctgtagtgcagtggcacaatctcggctcactgcaaccttcacctcccgggttcaagcgattttcgtgccttagccacccgagtagctgggactacaggcacacaccaccatgcccagttaattattgtattttttagtatagacagggtttcaccatgttggccaggcaggtcttgaactcctgacctcaggtgatccatccgtcttggcttcccaaagtggtcaaattataggtgtgagccactgcgcctggcccaatgctttttttttttttttctcgagacaaggtctcactttatcacccaacctggaggacagtggcttgatcatagctcactgcagccttgacctcctaggctcaagcaatcctcccacctcagccacccaagaggctgggactacgagcacacaacactacgcatggctaattaaaaataaaaaaaaaaaaggccgggcacggtggctcatgtctgtaatcccagcactttgggaggccaaggcgggtggatcacgaggtcaagaagagaaaaaaaaaaaaaccatcctggccaacatggtgaaaccctgtgtctaataaaaatacaaaaattagctgggtgtggtggcaggcgcctatagtcccagctactctggaggctgaggcaggagaatcacttgaacccgggaggcggttgcagtgagccaagactgtgccactgcactccagcctggcaatagagcaagactctgtctcaaaaaaaaaaaaaaatcttttatagagacagggtctcaccatgttgtccaggctggtcttgaactcctgagctcaagctatcctcccacctcagccttccaagatgctaggattataggtgtgagcc[136 bp omitted]acttcccgaagggctgggattacaggtgcctgccaccacccccagctaatttttgtatttgtagtagagatagggtttcaccatgttggccaggctggtctcaaactcatgtcctcaagtgatcctcccacctcggcctcccaaagtgtggggattataggcgtgagccaccatgcctggcctgatctataattcttatgtaagttttcctaaaaacatctgtaaactgcaaaaataggcactaaatataatacatctgtcaggcatggtgggatgcacctataatgacagatactcaagaggctgaggcagaagcacctgaacctaggagttccaggtgagccttggcaacagagtaataaccccatctcaaaaaagaaacaaatagtaaaatgtattaaatatatatttatgatatagtttgactctgtgttcccccccaaatttcatctcaaaatgtagtccccacgtgtcgagggagggaaatgattggattacgggggtggttcccccgccgctgttctcatgatagtgagtgaattctcacgagatctcatggttttataaatgttcgtttttcctgcaccctcacatacttctccctcctgccgccatgagaagaagcttctttcttccccttctgccatgactgagttttctgaggcctctccagacatgtggaacggtgagtcaattacacctctttccgttataaattacccagtcttggattttttttttatagcggtgtgaaaacagactagtactatctatcaatctatctataaaacaaggcctatggaaaaagggaattggggctgaccgcgactcctaattatcatgcaagcacagtttgcaggacttgttaaattactaataaattaggaaatggcactaatttagctttaatttttttttttttttttttttgagacggagtctcgctctgtcacccagagcacagcactgccggagtgcagtggcatgatctcagctcactgcaacctccgcctcccaagttcaagcaattctctgcctcagcctcccaagtagctgagactacaggtgcgtaccaccacacctggctaatttttgtatttttagtagagacagggtttcactatattggccaggctggtctcaaactcctgacctcatgatctgcccatcttggcctccccaagtgctgggattacaggcatgagccaccacgcccagccttatttagctttaaaaacactggctaatgtgaaccaacaagaggaaggtggagttgatgggcactgggaacgtcttacgaggagacttggccacactcggctgtatttgtgaattgtgcatttcattgccactatttggggggccactgctttctgggagaaagcagtgtgaactgtgacatccagttcactagtcctcaaaacccagtcttctagtttctcaatacatgagctattgtatcacaaaagcacgcgctgtagcagaacaggtgattaccattgttcctgttttgcaaagaaggcaacaggctcagagaaggccagtgcctcgccccaagacatgctagctctgactaggatgccatgaccacgctgtcccctgcccactacactcacccggtgtgtagccccaaggctcatagtaggaggggaagactccaaggtgacagccacggacaaactcctcatagtccacagggagcagggggcttgtggaggagaggaactccgggtggaaaatcacctggtagtgaaaaagaaggactcagcccaagtgccttatttagctaagccctgagatcccaaggtggcccagagagggtaaaaagcttgtctagcatcacacagcatgtgtttggcaggaccaatgttcaaacccaggtctgcctgcctcagaagccagggttctttctaaccacagcaatacctttgataaaacttataggggaatggagtgtgtgaggcccaggacccaaccccttccctctgccgtgcccaacccagccctgaccaaatgccctcaccttcaccctgtcggcactgctattgaagaggccgattcggcggatggtggtcaggatggggtctgaggagtcatccagcatattgtgggtgcacacaggggggaaagactgccgctgcaggagccacaagaagggtaaggggtcatggaagggacagagaactccctacttcctcatgagccatgcggaccctgggggagccaaggagaccacaaatgcaccggacgtggggcaacaaacccaagtgatcaccaggagttgtggattcccactagtacaacctgtaaaggttttctttcttttcttttaaattattattatttatttttgaggcggagtctcgctctgtcgcccaggctggaatgcagtggcacaatctcggctcactgcaagctccacctcccaggatcatgccattctcctgcctcagcctcccgagtagctggaactacaggcgcctaccaccacgcccggttaattttttgtatttttagtagagacgaggtttcactg[136 bp omitted]tcactatgttggccaagttggtctcgaactcatgggctcaagcgatgcatccgttttggcctcccgaagtgctgggattacagacatgagccaccacacctggcctggaaatgttttccttcccttaaccaccatgagcttcaaagaactagaattcccagctgtctttgaggcaaagccgtgttagcaactcccttacctccaaggactatgaggagttgcagctaccttgttctgtactctgggctctattattaaagaaacccaaaggaaatataactatccccagtcaatgggggtggagactgtgccaatatggcagcaagctttggagactgctgggagttgtagtttccttatgaaaattcacttccaaccaccaggcgtgg[298 bp omitted]ctccaaccctaacaaaggcccaaagaaaccacaatttccaagagtctctggagcaagacagagctagtgtgataggaagtcctgaggactgctggggtgtatagttcttagcaactgttccatcatagctcattaaagattttacttaccaccactctactgagtctaggggcccgagaaactacaactcccagcatcccgatggcagaaacattcataatgaggtgggctgctttagggactattggaaattataggttagccaaaagcagttcacgttttgtttctacaacttagctgtctgggtttccattccccaggaaatggctccccaatgtagaccacaagtactgaagtccctggaccccagagaatgaaagaactctaactcccagaagcctctggacaagggaagcgtcaatgccccagaaagccagcaggggctgctgggagttgtagttttttgggcccctagactcaatagaatgacggtaagttctcattttataaatgccaattctctctgaagttagggatctaaagcagctacaattcccaggggtgtctggggaccaacacacagcctctggaaataagaaaccgcagctgctgagagtttgcaatgttttctggagaatgctgggtgcttttgctcacctcctgactgcgtccctaaagtggcccgataaaactaccactcccagcagttttaggggtagaggtggagccgtgtgcagcaaggcccaaggagagctgagagttgtaattcttttatggctgtcttgaccttttcttttctttcttttccttctttcgtgtgtgtgtgtatgtgtccgcctcgctctgttgcccagtctggagtgcagtggcataatcatagctcactgcagcggcataatcatagctcactgcagccttgacctcctgagctcaaggcatcctctggcctcagcctcccaggtagctgggataacaggtgtatgccactatgcccagctcatttttgtatttttggtagagacagggtttcatcatgttgcccaggctggtctcaaactcctgggctcaagcgatcctcccacctcagcctcccaaagtgctgggaatactgacaggtgtgagctaccaagctgggccttgactttcttttgggggtgggtggggggctagtgtgggatctggctctgtcccccaggctggtgtacagtggcacagtcatggctcactgcagcctcagcctcctggtctcaagtgatcttcctgctttggcctctcaaagtgctgagattacaggcatgagccaccacacctggccctttattacatttctacacttccttttaaacttccctttgggctgggaacagggactcacgcttgtaaactcagcactttgggaggctgaggcagacagaacacttgaggtcaggagcttgagactggcctggccaacatggtgaaatctcgtttctactaaaaatatataaattagctgggtgtggtggcatgtgcctgtaatcccaggtacttgggaggccaaggca[137 bp omitted]ttccttttgctcattgaccccagaatcccagagaaaccacacgtcccagcaaccctcgtggcagaataagccacagaaaacagcccaccctaagtgcctcgcctccagcaactgaagttgcacgagtcagcacgtgcccttctgtggacctcagaatagatcccttcataaagggctgcaggagaaagcaggactcccagcaatctctggggtctgagctggcctggcaagctgcctctggggctgccaggaactgctatctctctgcacagaggtccaatccatacctgcgttgcaaagatggctctcttcatcatagtgaagtcttccttatccagcatcttgttcatgtcgggaaggctcccactgcaaggcaagcaggggcatgcatgtgagaacggagtaatgagaggggttagtcagggcctaggagggcacagggctgagggtggggcactcacaccagtaaggattcataaagcttcctcccgaacttttccttcaccgtgttggccgtgtccctggaggaagcagagcaacagggtcacatacacaccagctgccatttactgttaggcttctttagttagtttgtttgtttattttgagacggagtttggctcttgttgcccaggctggaatgcaatggcgtgatctcggctcactgcaacctctgcctcccaggttcaagcaattctcctgcctcagcctcccgagtagctgggattacaggcatgagccaccgcgcccggctaattttctatttttagtagagacggggtttctccatgttggtcaggctggtctcaaactcccaacctcaggtaatctgcccacctcggcctcccaaagtactgggattagaggcttgagccactgtgcccagcagtttatttattattattattattattattgacagagttactctgtcgtccaggctggagcgcagtggtgcgatcttggctcactgcaacctctgcctctcaggttcaagcaattctcctgcctcagcctcctgagtagccgggattacaggcacctgccaccatgcccggctaatttttgtaactttagtagagacggggtttcaccacgttggccaggctggtctcgaactcctgacctctggctggtaattggccacctcggcctcccaaagtgctggaattacaggcatgagctgccgcgcccagctacccttaggtttctaggatagcaaggaaactgaggtgtgagcagggaagccgtgccctggggcctccaggctggaggatggggacccagggggcaggccctggaaggcttaggacccacgtgcctgacatcagctgtgtggtcagggacaggtggccttccctctctgactgcagtgactcatttttcagaggaggatgaaaatagaatcaacctcagaggtttgcgatgaggacccaatgatgtcatgccaaaaagtacacatggcaagccttccagaaatgtcagctattattaggacttgtacttgtcctgcagatggcaatgctaagccccattttatacgaaaagaaagtaagattctgagaaaggaccacttaggcacacaagtaaagctagcagtgtcacacaacagccccacggtcactcctccacttaaaatcctcccatagctctggcctcatttatt[137 bp omitted]aattctcctgcctcagcctcctgagtagctgcaattacaagcgtgcgccaccacatctggctaatttttatatttttagtaccgatgggatttcaccacgttgaccaggctgatctcgaactcctgacctcaagtgatctgccctcctcagcctcccaaagtgctgggattacaggtgtgagccaccgcgcccagcctctttctttcttttttttttttttttttttgagaccgagtctcactgtcacccatgctggagtgcattggcgcgatcttggctcactgcaatctctgcctcccgggttcgagcgattctcctgcttagcctctcgagtagctaggactacagatgtgtgtcaccacgccctgctgattttttttatttttaggaaa[131 bp omitted]agacagagtctcactctgttgcctaggctggagtgcagtggcgcaatcatgcctcactacagcctcaacctccagggccaaaatgatcctcctgcctcctgtagctggcactacaggtgccctccatcttgcctcactttctaccccttctctatgagacatgtcactccagccccatgggactccccaccgcgtctcaatcatgcctcggggccttcgagtttgctgttcctcagatacccacagggcttgctccctcgtcacctttcctcgtctctgcccaataacactttctcagtgtggcctgtcctgacaaccccgtctcatattccagttctgctttatttttgcccaaaagtaaattccgtctacaggattttctagaatacaagctccatgaggaaagggatcttatctttctggttcacagctgtattcccaggacctggaatacatgaggagggcaggtcacttgaggtcaggagttcaagaccagcctggtcaacgtggtgaaatcccatcggtgctaaaaatataaaaattagctagcacatagtagatgctcagtgagtatctctgctaatgaatgaacggttttacagatgaagaaactgagctttgctgggaggcggaggttacagtgagctgagattacgccactgcactccagcctgggcaacagtgagactctgtttcaaaaaaaaaaaaaaatcagagaaaagaaaaagaaactaagccaggcgcagtggctcacccctgtaatcccagcactttgggatgccaaggcggctggatcacctgaggtcaggtgttcaagatcagcctggccaacatggtgaaaccccatctctactaaaaatacaaaaaaaggctaggtgtggtggctcacgcctggaatcccagcactttgggaggctgaggcaggcggaacacctgaggtcaggagttcaagaccagcctggccaatatagtgaaaacctgtctctaataaaaataaaaagttagccaggtgtggtggcacacccctgtagtcccagctactcagaggctgaggcaggaaaatcgcttgaacccaggaggcagaggttgcagtgagccgagatcatgccattgcactccagcttgggcgacagagcaaaactccatctcaaaataaaaaaaaaaaagagggccgggtgcggtggctcatgcctgtaattccagcactttgggaggctgaggcgggcagatcacgagatcaggagtttgagactagtctggccaatgtggtgaaaccccatctctactgaaaatacaaaaattagccaggcatggtggtgtgcacctgtagtcccagctactcgagaggctgaggcagatgacttgcttgaacccaggaggtggaggttgcagtgagccaagatcgcaccactacactccagcctgggcgacagagtgagactgtctcaaaaacaaacaaacaaacaaacaaacaaaacaaaaaactgagactctaggagaaacacaggacccaaagcatgcatctgggagtgggctgcgccaggggccggagcgagggctgctaaccaaagctgtttgcgcacagcttggcctttgagggtttccacgttgaaattgttggtccgcgctggcatgatgaagaaggcaaccactgtctgctcgctgccgttcacctgcgcagaaagaaaggagggggaggccaggatcatgtgggggaagcctggaaccagccagcctttctgtcaagaccactgggatcctgccatacccattcctgtcaaggagaattataggacagtccccacctggactctgaccttctttctgggtctctatactcccctcacggccccccaccatactcaggggctttcctacccccatcttcctggcttcttgggtttctgttctgtaattttttgttttgttttgttttgttttgtttttgagacagcgtctttttctgtcgcccaggctggagtgcagtgatatgatcttggctcactgcaacctccacctcccgggctcgcgtgatcctccccgttcaccctcccgagtagctgggactacacgtgtgagccaccatgcctggctaatttttgtattttttgtagagatggggtttcaccatgttgcccaggctggtctccatctcctgggctcaagtgatcctcccgccttggcctccaaaagtgttgggattacaggtgtgagccactgtgcctggctgttctccctagttataaactgctttgcttgccctccctgtcccctcatagcccaggcctcactctgagcagatagttgagccgagccaatgcctccaggaagacgtcagcacccttgttggagaactcatagcggccggcgataaagaagtataaggtcttgtccaagttgaagtccagatgcctaaagaacccacaaggcacggtaaagcccaaagccctcacccgctagccctggcctcaaaactacaaatcccagaagctatgggtgggggggcagaggatgtcttaggtaatacagaggcatcacggggcctcctgggagttgtagttcttctctttagatggagatttcctttaatcctgagcccattgttccagcgctcaagaattaaggaggccgaatacccaggtgccccctccctcagacccaggagtctgggcccccagctgccccctcccccagacctagatggttaggctcccaacgccctcctctcttaagacctaggtatatgccccacgtacccataaaaatggccccgcacaaactcctggattcgagccttgctctgagcatggaggttctggaactcatgcatggcagaaaacttcttcacattcagcccattgggggtcacaatatctgggattgggggtgagggtcccatgttttatttgttcattcagatcaatgttgtggttgaatgaataaatgaagaaaacaccctttgccttttgcaatttttttgtttcaagagcgttcctatgaggtcccccctcccaccttttttgtttgtttgtttgtttttggagacagggtttctctctgtcgctcaggctggagagcagtggcacaatcacagctcattgcatccctgacctcctgggctcaagcaatcctccctcctcagcctcccgagtagctggcactacaggcgtgcactaccacacccggctaatttatttattttacttttgtagtgatggggtcttgtcatgttacccaagctgatctcaaactcctggcttcaagcagtcttcctgccctggcctcctaaagtgctgggattacaggtgtgagccaccatgcctggccagttcccttggtgacacacctaccctgactccaagatgccttcttgcctaatattacttgcttaggttcacaagcacaagtataagtctcctcagctactgcaaatggctaacagggatctgatccacactggtgattctgggaaagttgtacttcttttgtttcctcttagcccaccctgagatggaaatgattaaacatccccaaagtcctgcttctcctaggatatatcctctacttccaagcttcttacagggacccaatcatttcttctcctcatagaaattaaagtatatcaacgaaaaactacaacccccatcagcgcctagggcaaagttctggaacatatagagctaaccagtcaaaggccttctgggagttgtagttctcaccttatactcactgagaacggatactaagggctgggaagaatgcccagttctgacctaacctttctcaaaagcaaagtccactgatcttccattccctttcataagaccaatctacattagccaattacagaattttatcatatctgaaattaatatgaaagaaattatacctcccattagcctccagagtatatagtcagagagcctcaaatacaggtcaccacccccacagccttctgggagctgtagttctctattctttaggtaaaaaaatggtaactgatggtccccagcttaggacttaggatggtccaagttatgatttttcttttcgagacagagtttcgctcttgttgcccaggctggagtgcaatggcacaatcttggctcacgacaacctctgcctcctgggttcaagagattctcctgcctcagcctcccgagtagctgggtggctgggattacaggcgcctgccaccatgcccacctaatttttgtatttttggcagagagggggtctcacaatgttggccaggctggtcttgagcacatgacctcaggtgatctgcccacctcagccttccaaagtgctgggattacaggtgtaagccaccgtgcccagccaagttatgatttttcaaccttatgatggtgtgaaagttacatacatccacatgagtccaattttggattttgatgagatattcaacactttttttttttaattttttgagatggagtctcgctctgttgtccaggctggagtgcagtggtgtgatctcggcccactgcaacctccgcctcctgggttcaagtgattctcctgcctcagcctcccgagtagctgggattacaggcacccaccaccacgcccggctaatttttgtatttttagtagagatggagtttcgccatgttggccaggctggtctcgatctcctgacctcgtgatctgcccgccttggcctcccaaagtgttgggattacaggtgtgagccactgcgcccagcctattcaacactttattataaaataggtttgtattaaaattagccaggcgtggtggcaggcgcgtatagtcccagctacttgggaggctgagg[139 bp omitted]tggatgattttgcccagtcgtaggctaacataaagtgttctgggcacatttaaggtatactagcctaagctatgatgttcagtaggttaggtgtattaaatgcatttttttattttttgagacagggtctcactgtgtcacccaggctgtgacagggtctctccaggccacccaaatcatgcaatggcacgatcacagctcactgcacccttgacctcctaggctcgagcaatcctcccacctcagcctcctgagtagctagggatacaggcacacaccatgtctggcgaatattttagacagggattcgccatgttgcccaggctggtctcaaattcccgggctcaagtggttctcctgccttggcctctcaaagtgctgagattacaggtgtgagccaccatgcccagccgaaatacgttttcggtttatgctatttcaacttacagtgggcttcttgggctgaggagcaactggctttggcatagacagctgcctacctcattcacgtctggggacttcagcccagcccctacctggtttcctcttgagcaagtgctgtgcctcgatggcggtgatctgggacacagtagtgaagacgtgagcgcagtgggctgccgccctttccatgcagtatcggtggtagatctgcctctcccctgcttccttgtccacgttgaactgggtgggaggggacagcagtccggttagaaggattggggagaagactctggaggtccagacactggggtcccaagagaaattggtgctgggggctggattcctgggtctgaggtaggaggggtctggggacttggactcctggatcctgggagaagagggggtgccatccccttgggccccccagagctttgggttttcctggcatactcgcagtcccccatctgccacggtcccagctcacgttctccaggttgttgtagaagtccacggcaccggcacacaggtagcgccccagcagcgtggcatgggtggtgaagatggttgctacaggcagtcgccgggcacgacacaggcagagtccaacgcctgccaaccactcatggaagtgagcaaccacatgtggcttctcctcactctgtgccaggaactgtgggcaacagggacagggccactgtctccacgagtgttgggaaaagaatcggcaatccccagtagggacaaggactcggggagaggtcaatctgtcaccactactgcacagagtgggcagcggcccactgcagcaatcccaaccggacagggacctgtaaatccctgaggcagcccaggctggtcttgaactcctgggctcaagtgactgcctcctcaggggttgacaggaactgaggattttttggccaaccatctaagtcctggcagggttagattggacagactgaagttttcatgttcccaggtcctggacatagtttccaaagaccccttgtctcaagggtacgctgtctgcacccaacattggcaaagggactacaactcccagaatgccataggagcagccagttcctcaattatttgtcccagggcatgagaaattaagcttctttttttttttttctttttctttttttttttgagacagtgtctcactctgtggcccaggctggagtgccgtgatgcaatctcagctcactgcaattcccgcctcccaggttcaagcaattctcctgtctcagcctcccaagtagctgggatttgggattacaggtgcccaccaccacacccagctaatttttttgtatgtttagtaaagacgaggtttggccatcttgaactcctggcctcacgtgatcttcccccatcggcctcccaaagtgctgggattacaggcatgagccaccgtgcccagcctggaaactaagcttcttgagcctcttaaaacctagaagggggtcaaaaccaggtcaggctggggattcatgagcatccagggcagcatctgagagctgagtccagcaatatcacactagagaactacaactcctagaattcctcgggcaagcccgccagcctcactttgaggctgattccaagaatccctatgcttggaagactagagtaaatgaagttggcatcgagagtagagcctgggcccttggatgttcatgtcctcaaaggccagagctaatccttggattaaaggaccctatgactcccagaatgcccagggagaagcccatcctctggcccaggggctgatggtcattgtagtttcaggtatgggtggaatgtgtcagacggggcctacctcacccaggaaccaggtggtcagaaagccaaagaggacagcgtcgttggcctcgcggtcgtaccacggcactccgatgttgcaggtatcccagagctctcccttccagcgctccagggcccaagctgaggcacccacgtccaggagcaccaccagagggcctccctcgatcagccagcgcccgaaatacacctgggatggggttggggaggcaccatagggaggctctgggcttcagcctcatatcttcactcatccgtggttctcccatttgcaggcagatgtctatagacttaagcctcagctctcttatcttctgtttccatatctgctgctaatttctcacctgctgccttagccttacttctctatttgcatgatttattcctgctacacattttttccatctctgttgcaatattttccgtgccccctgcttactttctttctttcttttttttgagatggagtctcactctgtggcccaggctggagtgcagtggtgcgatctcagctcactgcaacctctgtctcccgggttcaagcaattctcctgcctcagcctcccaagtagctgggattacaggcacccgctcccacacctggctaattttttttttttcttgagacggagtctggctctgttgcccaggctggagtgccgtggcatgatctcggctcactgcaacctctgcctcctgggttcacaccattctcctgcctcagcctcccgagtagctgggactacagcggcccgccaccacgcccggctacttttttttgtattttcagtagagacgaggtttcactgtgt[139 bp omitted]tcctttctctgcttataaccacatatgtcacatgtcctgtgtctatgcccccactgccctgtctggccactctgcaaatcatttcccctacctgctgccttgtttctgtacttgctgccacatttctcttaccaaccatctgcatctcccactgtcttttctttctgatgctaattccttccacgggatgcttcttttttgttttcagacagggtctcgctctgttgcccaggctggagtgcagtggtgtgaacatggttcactatagcctcaacctccctggctcagtcaatcctcccacctcacctcctacaggcgtgggccaccatgccaggctgattttttaattttttgtggagatggggtctcactatgttgcccaggctgatcgtgaactcctgcgttcaagcagttttcttgcttagcctcccaaagtgttgagattagaagtgtgagccacctaaagcaggcccttttttattttcagagacggggtcttgctctgtcctccagcctggaagggagtggtgcaattacggttcactgaagcttcgatctcccaggctcaagcaatccttccaccgcagcttcccacgtagctgggaccacaggcacaaggtatcacatcccggctaatttttaacttttttgtaaggacagggtttcaccatgttgcccaggctggtctcaaactcctggcctcagcctaccaaagtgctgggattacaggcgtgagctactgcacccagcctgtaatgattctcttactgttcatgctgccacttttcttccccatgatgccttgtttctgttcctttcatcacatatctgtcacctgcgacctctttcctctatccataggcccattttgtagtccacagcctccttccttccttccttgcttccttccttccttccttccctctctccctccttccctccctctctcctttttctttctttcttccatttttttttgtttgtttttgtttttgacagggtctcactccggtcacccaggctggagtgcagtggtgcaatcatggctcactgggctgggcgcggtggctcacgcctgtaatcctagctctttggggggccgaggcgggcggattgcctgagctcaggagtttgagaccagcctgggcaacatggtgaaaccctgtctctactaaaatacaaaaaattagccgggcgtggcagcatgtgcctgaggtcccagctacttgggaggccgaggcaggagaattgcttgaacgcgggaggcggaggttgcagtgagtcgagattgtaccactgcactccagactcagcgacagagtgagattctatctgaaaaaaaaaaaaaaaaaattatggctcactacagcctccacatcccatcctcccacctcagcctcctgagtaactgggatcacgagcacgcaccatcatgcctggctaattttttgtatttttagtagagacagagtttcgccatgttgcccaggtgggtcaggaactcctgggctcaagctatcctctcacctcggcctcccaaagtgctgggattccaggcatgagccaccgccctcggccacgccacacatttctaacatagcccatcctctgtccgtgccccagggctgcatttttctagccactgccgtgtttctaagacttgctgtctcacttctgcctctgccacatttctccagttggctgttttcctccctgagaccatggctttggttctgggcctgctgccacagcagtggagaagcagccccgctcctcgccgacctggctttttgctgcctggagcctcgctctgaggtccctccccctcccagctgttgtctgcccttttgctgggggggggggggggctattcttaggcccccagcacgtgggaagcagctgccctcaggaagcgactgggctgttctgggttcccttagggacacagtcggacctgaatggattccagaccccaccccaaaccagaggctgtgaatgagtaaaggaaccacagtgcctctccatccccagcctggacctgtctgtcccttagccctgccgcctgatggctttctccttggacaacagcgtgccgcctgatggctttctccttggacaacagcgtgtctctttccgtcttcaccctggggccctggaactccccctcctctctaatccctgatctgcccatctcagactctgtcctgtgggtctgtccactgacctctcctctcttccccgatattccatgcttctctctccttctaggactggctttctgaaacatctggtggcctctcttctgtccccagtctattactcttgcctgtggctccatccacccttctcccttggtctgcctgtccccctcactctccaagcttggctgttagtaacaataatgacgatgatcataacaatgacaatcaccgcccacacaatgtgctaccttcatgccaagaactctactaaccactttgtccttattaactgtttcctcctcccagcaccgctagaaggtagacgctattagcatgtccattagccaaggacacacaggcagcaagtggagggtgaacttgaacttcaagctccagaatcctgctccttcctgacctcaggcccacttctccccagctctgcctggctggctggcattcttttctgagacagagtctcgctccgtcgcccaggctggagtgcagtggcccaatcgcagctcactgcaacctccgcctcccgggttcaagcgattctcctgcctcagcctcccgagtagctgggattacaggcacccgccaccacacccagctaatttttgtatttttggtagagacggggtttcgccatgttgaccaggctgtctttcgatcttgctctctttctctctgggtctgaggaccttggcctcttggatctccgtctcagtctgtctcatacttgccatctgtctgtccattcgcccatgtctgggatccacccacccacttccaggccctgcatctgtctgggtgtcctatcacgcctccttcctgtgtccaagcctgcctcgctctctggctggggctgtccaccctgcaccctctccgtctgtggctcccaccccgatggcaggctgtccacccgcttctgccctgggctgggccacgtcccaccttgcagcccttgctgttcatggaatccagtgtcctcttcagggccggggtgggggcctccagcagttccacctgggtcctcacgccctgctccgtgtacggccccaccaggaagtagttgtcgccccattcgtcccctgtcaccttcgccttcgtctgcagcaccgtgtagatgccacccactgtgggcccaagcgtgtgagggcaggccccggccgaggtccatagttctggggcctggggtggggtgggccggggatgtagggggcactcaggccccagacctctagctcagggggaagaggggactgggagcccatagtttggagtaggggttggaagcttggatgaggggaacacgagggctggagggcagtcctcctgggtctaagggagaagggggctggggtcaggaccctgaaggaggagggggctcaggctagacttctgggtctgagagagaaggggctgggtgccgggaccccttggtctgaaggaattaggcactggggctctaaggatggcagagctgaggactgactacccggactcaggttcccgagttcccagctcacaggagctgggtttaaatcgcagccaggctccaaaacccagtgagggagaccccctcatggccaatccagcttctcaccattgcccaagagaagcctgcatggtcattccctgcccccagggaccttgctgacctgcctcccaatttcctctccctgactagggacaccagcatgcagggctctgcctctcccatgaccctatcccagacccaggagccccagcccccagcctcctcccatcctggagcccaggccctggcgatacccggctgggtgttcacgggccccctctcctcctgggagacacagtccctttctcctccaagacccagcaaagcaaccccccagaccctgctctttgaggtgtgagattggcttgttcctggggatttcagccccagccttctccaaggccagaacctcagctttctgaagcccaagacacagaaatgcaggctcctagcccctcccatcctagggcccagcctctgactaacttaggacttcccagccttcccctattccagtacgcatgtgtcccaggccatgggctcctctactcctaggaactaatagctcaggccctcagctccttcaaagcccaggcattcattacagtctccagcccgtcccatctttattcttaagcagccagatcctcaggtcctcccaccgccgctcaggcctcctatctcccagtcagctctctctcaaatctggagttttatcccctagaccatgctgttagggtcataggtctgaaaccccggcagcttcccaggtttgcacgcagaaatcccatccccccatccccttccctgttcaggacccaggtatctagtctctcggaagcctgcctccaggacctaggagtctcattttagcgccctcttccctaggacccagaacccgggcttccagcctcctttcatcttaagtcaaacgaaccatccctctcccacccacctccggcttcccagcccctcctcaaggacacagcctccttgcccaggtcacaagggttcccctagtagccccgtcctcctacaactcagagttccgggcccccatccactactgtccttctcgtcaagggccccgacgcctggcgtgctcacccttgttagccacctcccaggccacttcgaagagcactgcgttctccaggtcgaattcatcctcccagtcctccagtcctggcagtgaggacatggacaaagtgcggtttaaaggcatggctggcgcaggaaggggggctccggggatctccaggtagggaccccggaggtgtctagggaatgcaccaggtagggtgcggggccgagtagctggtgcccgacgggaagcttgcaagacgctcggcttcctattgcaagaccgcacccctgccccgaagcgttgggacctaggcagaaggaggccgcagcgtcactgagcccactggcgcccctgcagtgaaacctcgcagccgccaggaggcggtggccgccccccccagccagcgccattggcccacgcccgggggcggggatttccgcgtgtcctcattggtggaacgggttggagtcgctgtgtcccggccccgcctcggccgtgagacctccagggggcggagcttgccgctgcgctttacggaaacgagtggccttcagctctgtcaatctggagctggaggcctcaaagtggggaggaggaggagggtgggataaagaggaaaggagcgtggaggacgtgtggttactcaaagaacagctaagaattttgcaatcggcctgagcggggcggtggtggggctgagcaaaaggaggaggagccaggagacattgggaatggacccaggagttccggacgcccgtcttccagcgcagcctcggtgggagggcggggcataaagtcccgccacgcccccacaatatttacatatttatgaggaaccatcgagatctttgaagaaccagctagcctagaggagccagaacatctcgctcctcgcgcgtttccgtttccgctaggactctggcagttggtgagcatcatggcaaccgttgtaagtgtgggtgcatggagggtgaggagcgagctagcagtctcgagtttgagagaggaggatgctggaggccctgactcctgggtctgagggaggggggatctgggggttcagactcctgggtctgaaagaggaggaagctcggccacccagatctgggggagaaggggacatgggggctggacttctggatctgaggcggggagggggctgggatcccagaatctcgggtctggccccatcatgctataggaactccaactttcaaaatcatcttggcgcaacggccggttccgcagtccttggcgccagtgtgtgatgaggagggttgtaggaccttgcgcttcgagccatttgggagccttggattgttagtggtgccaatggcacttgagttccaagctggaagcacaggcaggtacctgttcagtgtgtctgagagcgcgagggcgcctagtgagcctttagtgggaagaaattgtcgaggaacaagagagtcttagtggagaggactgaaggattagggacccagaaatcgggatcttgtcatgctaccgttttggccattttcatatttccagtatttcacacgggctacgtctcagtgtaaatgctcaataaattatcacttgaatatttgaatgaatgaatacatgtgaatgaaggagaggccaggaaacttggcctggcacct[136 bp omitted]ctattaaaaatacaaaaattagccaggtgtggtggtgcaggcctgtaatcccagctactcagaaggctgaggcaggagaatcgcttgaacctgggaggcagaagttgcagtgagccaagatcgcgccactgcattccagcctgggcgacaaagcgagactctgtctccaaaaaaaaaaaggtaatgtgacctgaacttagggactgggctgggcttacaggtgcctcaatttccatgatgagcccagtcaagatggaggaagggagggggagaaagttgttggtagctggggatgagatttgagtctgttgctgtcaccagggcaaggaggaggaggaggtggatagggaagtagaagaggaaggctatgaccagaactaccgtggagaaagtattggaagtatgaggggacggtgtgtgctgagttttgaaatgaccttggttttcatgggaacagcgggcagcaaggttttggagagacttatgatgaaagagaaagtctttataggagacagtccttggtaaggggcctgtttatgttgagagagctacatttgggattcctggattcatgtcttttttgtggggtggggatgcctagtcttctgcttgtagtctgggggtaatgttctatgctcctgggttccagcttcctataggagacggtaggtgggaaggttcacacagtgacagggaaagcttgtgaccattgatggccagaaagtctaaacgattggctccagagggaggaggcttcctctgggctggataactgcatgtcctctctaggggaagaagagaagaaagacctgtgggctgggcacagtggctcacgcctgtaatcccacactttgggagtccgaggtagaaggattgcttgagcccaggaatttaagactagccctggcaacatagcgaaaccctgtctctacaaaaaaataagaaaattaggccgggtgcggtggctcacacctgtaatcccagcactttggggggtcgaggcgggcaggtcatgaggtcaggagtttgagagcagcctggctaatatggtgaaaccccgtctttattaaaaatacaaaaaaaattagccgggcgtggtggcacatgcctgtagtcccaactactctggaggctgaggcaggagaattgcttgaacccgggaggcgaaggttgcagtgagccgagatcgcgccactgcactccagcctgggtgacagagtaaggctgtgtctcaaaaaaaaaaaaaaaagaaaagaaaagagaagaaaattagccaagtgtggtgggacacacctgtagtcccaactacttgggagactaaggtgggaggattgcttgagcctgggaggtggaggccacagcagtccagcctgggggacaaaatgagatcttatctcaaaaaaaaaaacacaaacctgtgggaaggaaggagacctggggatgggtggcctcggttagcatgctagcttcttaggcttccttttccttattagaaattatgaactattccaaagtgtcagaaaataatgtaacagacatgcaaagatccaccatccaggattgtttttttgttttttctttttttcaagacagagtctcactctgtctcccaggctggagtgcagtggtgtgatcttggctccctgcagcctctgcctctctcccatgttcaaatgatcctcctgcctcagcctcctgagtagctgggactacaggtgcgcgtcaccacgcccagctaatttttgtatctgtgtgtgtgtgtgtgtgtgtgtgtgtgtgtgtgtgtgttagtgatagagtcttgctctgatgcccaggctggagtgcagtggcgcgatctctgctcgctacaacctccgcctcctgggttcaagcaattctcctgcctcagcctcccaagtacctgggattacaggcacctgccaccacgcctggctaattttttgtatttttagtgtagactgggtttcaccatgttggccaggctagtctcgaactcctgacctcaagtgatccacctgccttgacctcccaaagtgctgggattacgggcgtgagccaccgtgcctgacctaatttttgtatttttagtagagacagggtttcaccatgttggccaggctggtctcgaacccctgacctcaagtgatttgcctgcttcagcctcccaaagtgctggtattacaggtgggagccactacgcccagcctgttgttttttttttttcttaatagctttattgagatagaattcacgtactacataattcacccatttaaagtatacagctcagtgttttctagtatattcacagacttgtgcagccatttccacagtcaattttagaacattgtcgtcaccccaaaaagaaaccccatgcctcttacctgtcaccgctaatccttccatacctcccatcttcagttctaggcagccactaatctttctctgtatatggatttgcctattgtggctacttcatatagatggaatcataccatatgtgtctttcgtgtgtggcttctttcagtcagtataatgttttcaaagttcatccacgttgtagcatgtatcagaactccattcctggccgggcgcggtggctcacgcctataaccccaacgctttggggtgccaaggcaggtggatcacctgaggtcaggagttcaagaccagcctggccaacatggtgaaaccccatctctactaaaaaatacaaaaaaatattagccaggtgtggtggcggacacctgtaatcccagctactcgggaggctgaggcagaagaatcacttgaacccaggaagcagaggttgtagtgagccaagattgcgccattgcactccagcctaggtgacagagtgagactatgtctcaaaaaaaaaaaaaaaagaaaagaaaaaagaactccattcctttttatgactgaataatattcctttgcacaaatagaccctgttttattttgccattcatcagctgatggacatgtgggttgtttctatcttttggctgttgtgaatagtgctgccgtgaacactcgtgtccatgttttgtgtggacctctgggggggtcctgaattgtcccgggtggtgtttactcacctccctcccccatgtgagaaggggtggtagctggctcctctctgtggagaactgtcaacatgggaagcctcggtatattcttgttgaatgagctcagcactttagagtatcacttagcaaaccacagacattgagtcccgaggtgaacaagagagaacaggccgtgcccttcatgggactcatgtccactggagcagagaatattgatccatccatctccctcgggaatgtgagatcacacagggagatcgggctcccagggaggcctttcatctgtctgaatgtctagaggtcctagaactagcctggcagggctgttggacagaaagggcctcccctagggggcagcacttgatctaattcagtgagagggcagggagagcagtctggactcaggggccagcatgtgcaaggcctggtggttgagaactggggccgcctggtacaagggatgctgggaaattagcaggggccagagcatgtccagctccatgcctgctcctcattggtgtctgtccttatggagctcacagttattagaaatggggaggacttgtctgggcacggtggttcacacctgtaatcccagcactttgggaggccttggtgggcagatcacttgaggtcaggagttcgagaccagcctggccaaccccagtagagatgggcgaaaccccatctctattaaaaatacaaaaaaaattagccaagtgtggtggtgtgcgcctgtagtcccagctactcaggaggctgaggcgggagaatcggttaaacccaggaggcggaggttgcaatgagctgagatcgggccactgcactccaacctgggcgacagagcagactccgtctcaaaaaataagaaaaaaaaaaaagaaatggggaggacttagccgggcacagtggctcacgcccataatcccagcactctgggaggccaaggctggtgtatcacttgaggccaggagtttgagaccagcctggccaacatggcaaaaccccatctctactaaaaatacaaaaattagccgggtgtgttgatgcgcgcctgtaatcccagctagtcaggaggctgaggcagagaatttcttgaacccaggaggcggaggttgcagtgagccgagattgggccactgcactccagcctgggtgacagagcgagacttcatctcaaaaaaaaaaaaagaaacagggaggatttcattcattcaccaaataaccaaatatgtgctggaccctgaggaccaagctgtcgatgagacagacagtccttgtcttcctggggctcaaccaaccagccattaggcagtgacaggcaagaggggtgggggtgactggtgcctgtcccatcgcctgcctgtgaggggaaggagtggaaaggaccatctcatgggagggacagaggaggggttggtgaaagctgggaccacactagtcctctgacacatcttcttgcacccccagacagccacaaccaaagtcccggagatccgtgatgtaacaaggattgagcgaatcggtgagtgagttgggtcaggaataggacctaagccctgcctgccatgtgccctgacagagcaaacctattgaggacccctaagatggagagggaggtggcctgcacaccaactgtgcccccactaccattcccccactcgccctatctaatgggggaggaggatcctcagttccagagttgggtcagatgatgcactggggaccaggctgctatcctggctatcctggtggggttcccgggtatgtttgcctggaagtcatagatatttactgggtgctttactgggtttggcctcgtatacccagtacacactgtggggtgagttccctgagggcagggacgaggtcgtgtcattcctagctgtgtccctagcacaggacctaacagagcagatgatcaagagataaccattgaatgcacgagtttgcgtcctgtggagccctcgcagtagccgcatgaggtgcatattgtaactgttagctgagggaactgattttcaggacagctaaatcactggccccggctcacacagagcaggaagttgagacgcagtgaggccagcagggtgcgctctcacaaagagctttaccggcagggaagtgaccgcattcattcatgcagcaggctcactgattcagggcatccgagaaaggcagtaagggcttctggctgtgaagatgggttttagaagcccagtgctggattcctggagcttagctctgccactttcccaccatgtggccagggactagttcctctctgtgcctcagtttccttatctgcaagacgaagctaagatagtttacctcatcagttaatgtaagattcagtaaggtagttcatataaagcattttgggtctgtgtgccaacactgtttcatctattaaaagtgctggggcactgggtgcagtggctcatgcctgtaattccagcactttggaaggccaaggtgggcggatcacctgaggtcaggaatttgagaccagcctggccaacatggtgaaacctcgtctctactaaaaatacaaaaatttgctgggcgtggtggcgcgtgcctgtaatcccagctactcgggaggctgaggcaggaaaattgcttgaacgaggaggtggaggttgcagtgagccaagatcatgccattgcactccagcctgggtgacaagagtgaaac[150 bp omitted]tctactaaaaatacaaaaattagccaggcatggtggtgcatgcctatagtcccagctactagggaggatggcttgaacctgggaggcagaggttgcagtgagccaatatcgtgccactgcactccagcttgggtgacagagtgactccatctcaaaaacaaacaaaaagtgccaagtatggccgggcatgatgggtcacgcctgtaatcctagcactttgagaggtggagtcaggaggattgcttgaatcaggagttcaagaccagcctgagtcacatagtgtgatcctgtctctaaaaaaaaaataaaaaaattagccggcagtggtggtccatgcctgagtcccagctacttgggagaactgcttgaaccaaggaggttcaggatgtggtgagatgtgactgcaccatgcactccagcctgggtgacagagtgagac[180 bp omitted]c[138 bp omitted]cctggccaaaaaacaataaaaaattaaaaaaaaaaaaaaaggatgaagagccaagcaccgcttgtgagctgaggacccagtagagactagctgcacccaggagcctcccttggggtgctcacagtcaagcactggggtcagcaaatctttccttattttattttatttttttttttgagacggagtctcattctgtcccccaggctggagtgcagtggcgcaatcttggctcactgcaagctccacctcccgggttcacaccattctcctgtcagccttccgagtagctgggactacaggcgcctgacaccacggccgtctaattttttatatttttagtagagacgtggtttcactgtgttagccaggatggtgtctatctcctgacctcgtgatccgcctgcctcggcctcccaaaatgctgggattacaggcgtgagccaccacgcctggaccctagcaaatctttcttaaagggtcagatggtaaatccttcctctgttgaaactactcaactctcctcttgcagtgcgaaggcagccacagacagtatataaatggcagtgttccaatacaaagattttttggttggttttttgttgttttttttttgagatggagtctcactgtgttgcccaggctggagtgcagtggggcgatctcagttcactgcaacctccacctccctggtttaagtgactctcatgcctcagcctcccgagtatctgagactacaggtgcatgccaccacgccaggctaatttttgtattttttagtagagacggggtttcaccatgttggccaggctagtctcgaactcctgacctcaggtgatctgcttgcctctgcctcccgaagtgctgggattataagcgtgagccaccgtacccagctccaataaaattttatttgcaaaaacaggtggctggcctccaggctgaggtttgctcaaccctcatctaatgtaaagcatgggaatcccatcttcccctctcgctggctgtgtggctggggcatgggacctaacctctctgagctccctccccattcatatcaataggttctgggactgttgccattttgatactcagaagtgctttcagggtgatagcagccagggctcttgtttcattttattttgttttactgagacaggtcttgctctgtcatccaggctagaatgcagtggcacaatcttggctcactgcaacctccgcctcccaggttcaagcaattctcctgcctcagcctcctgagaagctgggattacagtcatctgccaccatgcccagctaatttttgtatttttagtagagacagggt[131 bp omitted]atcatatggaataaactgagaacatgtgggtgctgtgtaaaccataaacatgaagtaattgtgatcattagcccttgtggttagatcttagtacaattatgtgcttaatcaggcctcagtgacttttgtttaactaggatgcatcctcagagcagctccagttcattgagcatttaccacattcagccatcttcctagggaggtgccaatttgggatatcctttccatgtgccccttcattcccccaacccctgctccctactcccacccacccctttgacaaagaaggaaaccagggctcagaggggtcaggccacatgtgcagcaagctggctagtaactgagtctttgttctttcccttcatgtaggtgcccactcccacatccggggactggggctggacgatgccttggagcctcggcaggtagagcagaggaggctggggtgtgagggcctctccatgaaggtcttgggtagtgggtacccagggtcctggggagtgtggggactatgttacggtcttctggacctttggctacatacccataaacttcaaccacatgtgggttttcttggtactaaagaattgattaggctaggtgtggtggctcatgcctgtaatctcagcactttgggaggccaaggtgggtggatcacctgaagtcagagtcaagaccagcctgaccaacatggtgaaaccctgtctctactaaaaatacaaaaattagccgggcatggtggtgcatgcctgtaattccagctactcaagagcctaaggcaggagaattgcttgaacctgggaggtggaggttgcaatgagccgagattgtgccactgccctccagcctgggtgacatctcggaaaaaaaaaaaaagaattgggagtgggtagcaattgctttgccaccttaaaaaaaagttagactgggtgcaatggctcacacttgtaatcccaatactttgggaggctgagatgggaagattgcttgagcctaagagcttgaggccagcctgggtaacatagtgacacctcctttctacaaaaaattttaaaaattagctggacatggtggtgcacatttgtggtcccagctactcaagaggctgaggtggaaggatctcttgatccctagaggtcaaggctacagt[131 bp omitted]gcttccatctcactagcttcctgatgtggtagaaatgccatggtagccccacaggaaatcacctcatgtgcgcctcccacccacaggcttcgcaaggcatggtgggtcagctggcggcacggcgggcggctggcgtggtgctggagatgatccgggaagggaagattgccggtcgggcagtccttattgctggccagccgggcacggggaagacggccatcgccatgggtaagaaacctcccagggcaggaactctcctgtttcctgctaaataactcctcctgtgtaagtcagggtcaggatgagccgcctttaacagatgacccaaaatggcagtggcttaaacactcaggattcattcttgcccatggaagaatctagaggtaggccatttggggcttattaagcagttccaggaagtcttccatcttcctgcctcaccatcctctgcacttggttccagtcaagaggacgccatgttccaagagggctgccagagctccagccttcccactcataacccaggcagcaggaagaaaggagttgccatgaggatgaaccccctcgagttggcttcctttaaacagtcattggaaatcctccatgcttctgcttatatctcattatctcattgactagaatgtaatcatatgatcacactctgcttcaggggaggctggcacattaaatgttttttaaaatttcataatttggaccatttttgccttaagaaaatgaggattcttctgttgggcaaaaggttgttgtaaaaataaaaaattaaaaaaaaaaaaacaggaaagaaaatgagggttctagaactaaggaagaaggggaaggtgggtattgaggagtcacccagcagtctttgttgcagtccgctagtggtttatgatcttttcactcccagctgttcctcttcttccttgttgaactcctatttatccttcaaaaccctacttcagcatctctgccccattgaagcttttcctaacccactgctcttcccactcactcccacctctgtgctgaggctggggccaggcagggagaatcagagtaacagccaggtcttcagtgaagataaagcagtgcctgttggggtgctcggactggacactggggacccatagatgagttagaccaaggcctgacttcaaagagctcctggtctggaggaggtggtcatggacacgatcccttccaaggcgacatgtgttacaatgcaggtagcatgtgacagaggaggctcctgaccttggtaggaaaacggggcatgtggtggcatttgttgctagaggcttccagagaagcggatacctgagctaagcctagtaggatggccaggaggctcctgggcggacactggggacagcatgtccaggcccagaatgtggcacacacagtaacttccttccctccatcctttctgctttcctactcttcttcatttttttttttttttgagacagtttcactctgtcgctcaggctggagtgcagtggtgtgatcttcgctcactgcaacctctgcctcctgggttcaagtgatcctcctgcctcaacctcccaagtagctgggattacagatgtgtgccaccacacccaactgatttttgtatttttagtagaaatgggatttcacca[134 bp omitted]gcctttcctcttcttgtgtctcccgcaggcctcctgcaggccaaaccctgtgctgggcagcactggggtgaggctagcctcgccctggcggggacgcttcttagtctagtgaaagaggcagagaggacccctggtgtccccagatggcatgggccgtgctcgtccactcagccctcagcagatacttgctgagttctgtgatgagggccattgtgtatccgcaaagaggactaagaacaggtcccacttgacactgggcaggagggtgtggtgtcagcctgtctgaaagggcgtgccccacattggaccaaaccttgtggccagggaactggaaggaaaggtctggcgttcagagctattgctggagacagacctgcttcctgccagccaccccaggccaccggcggtagagcgtcctgccctgtgccagtttcaggctgcgcaaccgtgttactgctgagcaccagtgcctgcctgcctgcctgcccatagtcactcctaagcagggtgtcatcccatgctggcacgtgttctgttatcatccccattagacagagggggagactgaggctcagggagcagttcagatcgctcaagatcccacggcgccacctgcacttaagtggtggatctgggatgggagccgaggcagtctgccttcatcacttgtagctatcgtgtgggctccttggccttcgtccctggtccccttcgtccagctctgaggctaaacagctcgtagaggctgggagactgaggtgtggcgaggttctagggtgtaccctctgggcaatgtgggattctaagccaggcctgccggagcaacctgccctgcctggcttctcactcactgtctgcctcatggctgaaccccgctctccagttccccctccccagcgctctgctcagctcggagccaagtccttacatgtaggatggcactgaaccctctttcctggggtgggagaaaagctagtttgccacagagcaggtgtcggggacctggtgccagagcggcttcacctacacagactgcctccttcccaggcatggcgcaggccctgggccctgacacgccattcacagccatcgccggcagtgaaatcttctccctggagatgagcaagaccgaggcgctgacgcaggccttccggcggtccatcggcgttcgcatcaagtaagcgggggacccgaggcgggtgccagaccccagagcctgggagcaaccccgcaccccgggcggctcgtcctttgtcccagagctcatggaaggttgtgattcccgagggtccaggtgtcaggctgtctcctcagatctgctctctggctagggaggagacggagatcatcgaaggggaggtggtggagatccagattgatcgaccagcaacagggacggtgagtctgtgtgagtctgtaccctgctgaggccacctccagcgccagggttggagagagtagatatcaggtctgcactgaggtcagaatcccatggaatgttctagctgcagactagagccatgtacatgcctacagtaggaggtcagttaacttgacaatggcttatccccttatgaaggacattatgggcaatagaaactgaggcggtaaaataatgagagagatctgttagtgagttcccaacagacctcaaaacccaacagacttcaaaactcgttccgtggccgaaaggcatgtcctgtccatcttacatgatacaggtgatttgctctctcttttttttttgttttcgagacagagtctccctctgtcccccagactggaatgcagtggtgcaatctcggctcactgcaacctctgcctcccaggttcaagtgattcttctgcctcagccttccgagtagctgagattacaggtgtgtgcatgccaccacgcccggctaatttttgtactttcagtagagacggggtttcaccatgttggccaggctggtcttgaactcctgacctcgtgatctgcccaccttggcctcccaaagtgctgggattacagccgtgagccaccatacctggcctctttttttttttttttttttttttttacaatttctgttttctcctttttgcatagctgtgttttctgattttgtgatcaacaaaaacactttttatttgggtataaaataggaatgtcaaagtgtgacatttggcaattttgcgagacctcgggcctatgttgtttttgatagactttattttttaggcatgttgtttgtttactatttttattttttatttttattttattttattataattttttttttgagatggagtcttgctctgttgcccaggctggagtgcagtggcacaatctcagctcacggcaagctctgcctcccgggttcatgccattctcctgcctc[199 bp omitted]gagttttggccaggcgcagtggctcacacctgtaatcccagcactttgggaggctgaggtgggcgatcacttgagatcaggagttcgaaacgagcctgactaacatggtgaaac[139 bp omitted]tctactaaaaatacaaaaaattagctgggcgtggtggtgggtgcttgtaatcccagctacttgggaggctaaggcaggagaatcgcttgaatctgggaggcagaagttgcagtaagccgagatcacaccattgcactccagcctgggcaacaagagcgaaactccatctcaaaaataaataaataataaaaacacaaaacaattagctgggtatggtggcacacatctgtaatcccagctacttgggaggctgaggcaggagaactacttgaacccgggagatggaggttggagtgagctgagatcacaccactgcactccagcctgggcgacagagcaagactctatctcaaaaaaaaaaaaaaaaa[131 bp omitted]aaaccccatctctactaaaaatacaaaaattagccatgcgtg[135 bp omitted]caaaaaaaaaaagaactttattgagttttaattgacatacagaaagctgtacacattgcaagtgtccagtatggtccgttgggacatacatgttcagccgcggagccatcaccgcgtcaggctggtgagcgcaccgtatgtcttccctggagagcttccttgtgttgtgcccattttgaagctgtggaagcagaggccagagcagagccagaagcttatcaacactgggggcactggggcaacatcagggccctctctgagccccatccctggcttgtccccactctcagggctccaaggtgggcaaactgaccctcaagaccacagagatggagaccatctacgacctgggcaccaagatgattgagtccctgaccaaggacaaggtccaggccgggtgagcagtcaggggccatgccaggcagccagggggatgggcgagcttgggcccattcctttccttaccctaccccccatccccctgtagggacgtgatcaccatcgacaaggcgacgggcaagatctccaagctgggccgctccttcacacgcgcccgcgactacgacgctatgggctcccaggtgcggccgggactcccgggatcccctcgcccccagcactggggtgttttcatctcctccatcacccccttgacccatggggtctggatcttcctgttaccctgactgtttgtcctggtactcctgggtcttccctgtaaccctaggacagcagggcccctcagcctggcactatagcttcgcatggccacatgtggcctgtggcttctaaggtcctccgggagcccccgtgaccctcagcgctctggaatgtccctagtcctgactacctcctgggcctggggtttccagatgaccccatttagcctcccagctccatttcctggagctccagtctcccccagacagagggctttaggggcccccttcatgcccttccctgccctgtctccgccgttcttcccccacccccgccccatagaccaagttcgtgcagtgcccagatggggagctccagaaacgcaaggaggtggtgcacaccgtgtccctgcacgagatcgacgtcatcaactctcgcacccagggcttcctggcgctcttctcaggtgaggcccctcctgccctgccctgccctgccctgccccaggcctagcagcctccctcgggctccctctgttcctgagctccgagtgtggcccacctgctccacgctgtttcctgtaactccggcccgtggctgcctctgttctccacctgcaagtccgctccgtccccacccctgctggtgctgtgatgggtgtggccctgccctctcccctcctgtgttctctgcctctgttcctcctctttggggatgtttcaggctcctcatccctccttgctttgctccccttcctccatccctggcatcatccttctctgtcttagccacactctggccctggaacccgcctcctctctggcttccctgatgcaacctgtgcctcccataggtgacacaggggagatcaagtcagaagtccgtgagcagatcaatgccaaggtggctgagtggcgcgaggagggcaaggcggagatcatccctggagtgaggacccaggacatggccggggcgggtggtggggtggaggtgggccggggaagtggggacgcgggtggtgactctcacacacaccccaatccaaggtgctgttcatcgacgaggtccacatgctggacatcgagagcttctccttcctcaaccgggccctggagagtgacatggcgcctgtcctgatcatggccaccaaccgtggcatcacgcggtgagccggctacaggggcctctggggaaaacaggatgctctgggcagtgggtgtggtcagagggtcaatgggagcctgtgttgacaccgggtcagggagggacgcgtgactgcagtgtgcgctctttgcttacaaaaggcgggtgggaggcagctctgcttcccgaggaagcccagagactgtgttcttgctgcctttctgtcttgctgctcctttagcccccaaggctgcagtcttcaaactgcgtgccgaggcaccccagggtgctgcaggaaactcacaggagtgctgtgggatgttttctagtcttgagggaagcacagtgacatctgttagacataacataaactacgattgttcagtcacttcgacccagcaactccattaacagaactcttagcgttgtgtttggcctaaggatgccagggacagattcccatgacacagagggtaccgtgctctgctgaagcctgggaacctcatctcccaggtgttgccagcaccctgtgcacggggaactcttaatgttgtgtttggcctgaggatgccggggacagattcctgtgacacagagggtactgtgctgtgctgaagcctgggaacctcgtctcccaggtgttgccagcaccctgtgtagctgggattacgggcacctgccaccatgcccgctggctgtcttctccacctcgccacattttggcccgcaggaagcagggggatgtggagggcaggcagcccccataggctgtgatccacaggctgcaccccaaccttgcacccccattccattgcccggcactgcttgggctcagtgctgtacctggtggcaaagaaggctgggtactgtcagctccagccctgcagccttgggcccagctgaaactgggcggttgggatgggcatcacaaaagggaagaagcgggcaccctacagaggatgctgggccgctgggcctggctctgtgtttggctcttttaactccttggatccgcagaagaagctcagaaggtagatatcacctcagccccattttatagggcaggacagtgaggcccagtgacttgcccaggtcacaagtctagaaggtagcagggccgtaatttggtctctggatggctggacactggaagagacccccagggctgatggtgttttcacagaaactgcaggtcagggcctggggactgcccaggggcacctcctgtgggaggcagcagctacgggcagccctgattgttcgtagactctgtatctgagaatctcgcttgctaagatttatttgtaatccccaaataaatatctgccctgctttcggcaacaaattcaagtcacctgacacccactttcccagctgagtgtgaacgaggcaacactgcctgctcccttagcgctcatgctgtaaataagtgtccttgttgtattctatttagtgctacgtttgtcacttttgttctttgagacagggtcttgctctgtcgcccaggctggagtgcagaggcacgatcatggcacactgcagcctcagtgcccaccacacacacacacacacacacacacacacacacacacacaccacccctgggactcaatcagtcctctggcctcagcctcctcatcagctgggaccacgggcatgcaccactatgcctagctaatttctgtttttgttttgagacggagtctagctctgtcaccaggctggagtgcagtggcacgatctcggctcactgcaacctctgccttctgggttcaagcagttttcctgcctcagcctcctgagtagctgggattatgggcacccgccaccatgcccagctaattttggtatttttagtagagacagggtttcaccatattggccaggctggtctcgaactcctgacctcgtgatctgcccacctcagcctcccaaagtgttgagattacaggggtgagtcaccgcgtccggcctaattttttttttttttttgtagagatggtgttttgccatgttgcccaggctggtctcaaactcctgggctcaagcaatccacccgcctcagcctcccaaagtgttgtcactttttttgtgccttttttttttaaactttttggggccatttgttggtgatattgccatttaaagtgtcccctgtgcacagtgttgaagtgctgtctagtatcctaagtgcaaggaggctgtgaagcctgacggagaaaatgccatgttacagacgcttcgctgagcccaagttagaatgctgttgacacgagctccatgttagagaataaacagtgatgttacataacaaa[131 bp omitted]aaaccctgtctgtattaaaaatagaaaaaactagctgggcgtgatggcgtgcgcctgtagacccagctacttgggaggctgaggcaggaggatcggttgaacccgggaggcggaggttgcagtgagccgagatcgcgccactgcactccagcctcgcaacagagcgagactccgtctcaaaaaacaaaccaaaaagaccagaaacacacaaatgaaaatacgcatagacccagattatatatatatggattgatgaaaatactgtaagccgaggctcgagagagcctaaccctgtattccagtaggagcagtggctcaggatcagctaattggagtgttcacgatgactttctagaacctcactactgtgaataaggggaactgactgtatcccctggcaccagccctgggctggccccgctgcagcagggaacaagacaggtgcagtcccctcctttgtgaagctttgtgtcgagcacgggagtgggaccttgatccagtaatcctggaggcagagatctagcttaaagcagcccagctccgcggaaaggtgcccttgggggactgacgcagctgtggaaggctgcgtcatcaggggtgatgtcatcatgtgacaggagacgcgagctaaaggttaagtggtgttgggcccagtgagtgggtggcgatgggaggtgagagtgttcccagcaaagggaatgaagagggaacatgcccctgacagccccctctttctgcctcttcctcagaatccggggcaccagctaccagagccctcacggcatccccatagacctgctggaccggctgcttatcgtctccaccaccccctacagcgagaaagacacgaagcagatcctccgcatccggtgcgggcaggaccaggccgtgcgcctgagacgcagggctggggtctaccctgtttgacaaatgctgacactgaggtccagcggagtggcatggtggctgggcctacaggagagagggctgagcgggcacccagacggtggcctccgatccgggagcaggagccacggtgggaaagggaggcgaggtacccgtgactggtgttggggccagcgccctgggggtggtcaggaggcctcggttttaggtccagcccagcccctgtctccgtggctcttctagcctcagcattctatggttctaagatgcaggcgccacatattcccagtggggaagggccagagggttgctgtggccacttctgctgcagtcagaggctgggccccggctgagccacccctgtcccccactgcttgcaggtgcgaggaagaagatgtggagatgagtgaggacgcctacacggtgctgacccgcatcgggctggagacgtcactgcgctacgccatccagctcatcacagctgccagcttggtgtgccggaaacgcaaggtcagccggccgaattagccagcagggccagatggcggcagtgagtgacacagtacttcaggggcttccagggttccgatttcatcctagaatgtacgttttcagacgcagggaattttcatccctcaggttggcttctgtatcatccagcctggcctatagtaggtatcagtaaatctctcttgacttaagtagatgctgttaggtccaccttacagataaagaaactgaggaatgaagaggctgggcccacaacaaggagatggccaggcaggatttgaacccaggcaatctggcccagaatgccctcccctcacatgccacactctgctgcctagagcatggaggtggcatacgctggggtctgtgccttgagcctcacggagaggggcccaactgaggactcgccctccccctccagggtacagaagtgcaggtggatgacatcaagcgggtctactcactcttcctggacgagtcccgctccacgcagtacatgaaggagtaccaggacgccttcctcttcaacgaactcagtaagaatccccaccccgcacctgcactgccagagccaacctcagagggaggaagagggagctcggcgtagaaggctcaggccctgccacctgggcgacactgaccatgtggccttccttctccccacagaaggcgagaccatggacacctcctgagttggatgtcatcccccgaccccaccctgttttccaccagagttctgacactgtgactctgtataaaatggttgggaagctgcacccaccctgtgtatgtgtggttgccctgagcccacagaaagacacctccagagtgcggattgagaagcctttattgtgggaggatcggggtgtcagggctccaggagtcgggatggacttggaaggctgcggggagggtctttagaggaagaggaggcctgagagttgggggtggtcacaggtcaaggggtggtctttgggacccccacagtcagaggtgctgcggcggcagggtccacagcgacagctgagagccacagggaaggagaccacggggtccacaccacgcgggcagccagggagccggatggactcgaagcgcacatcacggtaggtgcacaccacctgaggcaggggcggcaggaccgcctgcagcacgcgcatctggaggccgtgtgagtgggggaatgagcatgtgcctgaggccagcgcctcagctgagctcccaagctgaccccacaggtcctggactcaggagcccaggaagccctctgttcctgccttcccacaccccattccccaaccgcaggccagagaggcagaccacccttcctcccccgctgcctctgtgggtctggccctgaggtggcagcatctgcccctggccccaggcagctcaccatggtggggcagtagccggcacagatggtggtgttgacggtgatgcacactgggcagccctccttctcgacagccaggatggcattgatggggtggcaccatggccgaagcggctccctggatgcccatgccccgcccatgctcagcagcagcaacagcagcagcccctgggacaaggacactgcttcacccaggtctgagaccgcagccccgagtcctggccttcccatcccgcgtggtacaccacccacaaagacccagagacccttcccggcatctcctattcaggacccaccacccggacacctgcctttcagagcccaccccacagcccagaggacctgagatgccccaacatttcagatccccaccctcaggaactgccccacctgaagcttactgggggtcatgcccctccagaaagaggcctccttccacagctcacacgggtctgccccttctcatgccagtgatggcctggaaggaggtggaaggtgcccaggggccctgtagtcttacctggagcatctccatccttggtgcatcccctgcctcgtgtatctggctatatacctcggggttgtgggggcggcaaggccaccaggaggtgataggatgctggggtaacctggacactaatccccccgggggcgagaggtgcacatggccagggaggcgcaggagtggctcagcagagcgccccagccctctcccctcagtggtctagcgccagaggtgaggcagagaccacggtgaagtgacctcagagacccagttgtcgagtgctagggactagtcgagcctggaggcacagggagtagggtgtaggaaggcctgcctctgccaattgtggggtcttgggagccaggaggaggccatgacccgagaaaggtgctggactgaagcctcaaccctccacttgaggctttcctgcaccacagtccaacctaacaggaggggcgctgcttcggacttagcttctgcccagtgagagagggtctccccgtgactgtgctgccagggaagccacttgacccagatgcccccaaggagggattaagcccgagccccacctctcccttagggacctccgcccaccctaccctcaagccaggatgcccggagcgtccccggaagtgggtgtggttcaggtgatttaactcattatttaatacgcccgcagggtgcgtgtcttgcccccggggccacagcctgcaaggacattatctggacttagtcccctctccgtgatgccgcagctgagtgggtgtctgggctagtcccgcccccacgttgccaatagacgtaatgagtgcgactcaggctgggtccggaacccttcctagtgagcggaggtcccgagctccgctcggcagcgcggccctgggggcgggtctggggtggggctggccctgacggctcacaccagcgccggcttcaagctgccatagctggagttctcggtactgtaggctttcggcacgctgtagatgccccgcaggggcttccagtgcgggccgccccagggcgcctccagcgggcagaagcggtcgagccgccggagcgggtgcagcagggggctgtaggactcctgagccagagacagggctccccggtgcggcatggccgaggtcaccgggctgacgcgcggcacgcggacccgcggtggtcggggcggccgggaggagcgcggacagggcggccgctgcgggccgtggctccagacctggggcgtctcttcgaagctccagtaggtcagggagtccttgcgggggtatccggacagctccgtcctgtgggagcagggcgggatggtgaggatacagctggatccttggggacgagtttcagacctcgggatctaaggagtctgcacattcaaactcctgcatttccaggcgagcaccccttaggaaggacgcgacccggcacgcgttgcctgcgttcctgggtcctcgaggtacttaacgtcctggaaactgagctttcgcatcctagggaagtaaaaggggactttcgcttccttgggaaggagtatctgggggctcaagtaccgaaggaggccctgccctcagatccggaatcccctcgagccgctgtgcaggcttcctgtccctaccgcggttcctgagaggtgacactaaggactcctgggtgcttaaaaaaaaaagggaggggctgaggcctgaactttggttcttgctgctacagaagtcgaggctgagaccaccggctcagggaatgggagccagcccaggggctcggcgtgcaccggccacggcgggggctgtgcaggaggcggtgccgagcgagagcccggcttacttgggatagaaccgaaagtcccgcgccgaggtggtcagatagagctggcggcggtccaggacgccccggtcggatactgtgaaaggccggccagacagctcggggttcttcgtccaggcaattagagcctgagcaagattgggggaggaggcatacccaagacatagatttcataccccatcccaagccctgggtcccgagttcagaatccctctccttcggcctcgacagccatgacggccacggccctcacaccccgccccagggttagagcccttcctgccacccacgccagggaacttcagcttcctttctcatacccgaacccttcccagcctcacctccctaaatccaagcaccttctgctgttcaaggaactcaaacccaagcccccagccaccaaaaacaacctccctggttccgctctgtcttaaaccgtcttggtgtggccactggagctgagctgcatcttgggcagcaactccaagttacctctcccaactcccacctgaccccgtctcagaatattctagtctcctccccacccacagcccgccgtctagctccgcagcagcttaggagccctgaaggtgagtttgtagtccctggtccttctggcctggcctaatgcccagcccctcccccggctcctctaacctcgcgatcccgccccagaccctttagccacgccccaaagccgtgattccttctggccccgccccaggctcccggagctccgccccgtctcgccggcgccggcttccacccagacacctgggaaggacccccgcggtggtggtctgcgagttgtgggggctggggcccgaagtattccggggcgcgcgggtccccgctgggagagccagtgtactgcgccctcgtctcgctgctctggtactttgtggtcagtgggaggcgccagccgcggtgtctgagctgcggaaaggcgacccagagactcacgtgaaggagcaggggactcaaatgcagtcccccgccctgtcccctgcggactccggcactccccaaactttaccttttctcctaaatccttgatccccacagtccgcgtggggtctgcaggctctggggctctgggctgggcgcagggcccgccatgggtcttgggcacgtaggccgagccagaggttgtctcccatctgctgaggacctcgtcgaaagcccagttgtgagaatcctgctttgcaacttggggtagagggtccgcgaccgtggactggagagaaggcgccgcacatcagctagaaagactcaggagtccctatcaccccccaccccaaactctgacctcttccagtcggcccccagccctttcctctgcagtccctggcattcagcttccctggtgcctcctctctcagacccagaactccaggaccctcctccttcagagaggagtccaagctcccaatccgctttatttagcccctatctttctgggtctccaggcccggcagggctgcagcgtagggtccgctcacctgcaccgtgggcggggtgaagggtatgggtgggataatgcggtgggaaaagtagctgctggtgagatggcagttgggcctggatccaggtacctcggttgcagagatacgacagcccggagccagggtgccactggccatggttccacccccactccgtagccaagcaggagctggcttattgtggttgttgccccaggtgacagaacccgcccacccagaacctagtcaatcaagggcctgcaggcacctggatggatggaatgagaaagagacccagagacagggaccccaagaggggtacaaagaaacacaaggagggggaatggagactcaaagataggagggtggaaagggaaggagaagttcagtatttcagagacccagggggtgggggagagagaaacccaaaaagagggacagggacctggaggtgtcagagatccagacagagagacagagacccctgcgctgcacctagcaactcaggacatccatgagaaacacccccctttcttccagggcccagatgctcctggctgcttcctccctctaccaggcctgcccacctcagggtaacgatttccagacatccccggggctccccgaccctccctgcatgcacgtgctgaagtaatcagcactagcattggctgtcctgcctgcctttgattggcttgaaaagttccacctgggtaggcggggtgtggaaacagggaggcacccacagagaagtgcaccggaccatagcgaaaaacatgggctttgatgagtgagaaagaaatacaagagaggagagagacagggaggaagacacagaccacgctggaaacggagctattagtactcacccagaggctagagccaccggaagttagagacagagagaaaggcggcaaaaaagagcaaaatcagagatggtaacaaggagatgtagaaacggaggcagccacacccctccctgccgaggggcctggtctgtacagattggtggagggggtgcctatgtcctttgctcaaagctggacctgagagagagagagggggagagaaagtgagagagagagagtgtgtgtgtgtgtctgtgtctgtgtgttggcaacacatgtggggagatgggtaataggtaaagggctattgtgaagtcctgtggtctgtcccagacagagagaaagagagagagagagagagagacagagtgtgtgtgtgtgtgtgtgtctgtctgtgtgttggcaacacatgtggggagatgggtaataggtgaagggctattgtgaagtcctgtggaccagagagagagagagagagtgagtgtgtgtgtgtctgtatgtctgtgtgttggcaacacatgtagggagatgggtaataggggtcataggtgaagggctactgtgaactcctgtggtctgtccctggcttcccttgtcatttcttcaccatatagagcttttggtcaccgggcacgatgactcactcctgtaatcccagcactttgagaggcagaggcgggcagataacttgaggttaggagtttgaaaccagcctggccaacatggcaaaaccctgtctctatcgaaaaatataaaaagtagccaggcatggtggcgcacacctgtaatcccaactaaggcaggagaatcacttgaactcaggaggtgaaggtggcagtgagctgagatcatgccactgcactccagcctaggggacagagcaagactccatctcaaaaaaaaaaaaaaaaatagcttttggtctaggcctctgcctcctcaaccctcattatctcatcccacgagcccattcttcagacaaggaaacctgaggctgccttctgcagccaggcccacaatcccacttactgttcctccctgaatcatgcttctggggcccttctgttggattttgctgaccctactcaagggctctcaatgacgaataaccccctgatcctagccagggggacggcgagttagtcagaacctcatgtcccactcaaactggacaatttttttttttttttgagacggactttccctctttttgcccaggctggagtgcaatggcacagtctccgctcactgcaacctccgcctcccgggttcaagcgattctcctgcctcaccctccagagtagctgggattacaggcacccgcctacacgcccagctaatttctttatgtaattttagtagagacggggtttcaccatgttaaccaggctggtcttgaactcctaacctcaggtgattcgcctgtcttggcctctcaaagtgctgggattacaggcatcagccatcgcacctggccatcaagctggaaaattttaaggtctgtttctttcccaatgtagagtaaagttgcgatgtcatcccccgaccccacactgttttctaccagagttctcatactgtgactctgtataaaatggtttggaagctggacccatcctgtgtgtgtgtggttgccctgagcccacagaaagacacctccagagtgcggattgagaagcctttattgtgggaggatcggggtgtccgagggccccgggagtcgggatgggcttggaaggctggggggaggggcctttgaggaagaggagtcctggaagcgggggtcatcacaggtcaaggggtggtccttgggacccccgcagtcagtggtgctgcggcggcagagtgcacattgacagctgagagccacggcgtaggagaccacggggttcacgccgcgcgggcagccagggagccggatggactcgaagcgcacatcgcggtagttgcacaccacctgaggcagggccggcaggaccccctgcagcacgcgggtctggaagccgtgtgagtgggggaatgagcatgtgcctggggccagcgcctcagctgagctccccagctgcccccacaggtctcagactcaggggtccaggaagccctctgttcctgccctcccacaccccattccgcagcccctgaccagagaggcagaccacccttcctcccccgctgcctctgtgggtctggccctgaggtggcagcacctgccccggccccgggcagctcaccatggtggggcagtagccggcacagatggtggtgttgacggtgatgcacacggggcagccctccttctccacagccagggtggcattgatggggcggcaccgtggccgaagcggctccttggatgcccatgtcccgcccatgctcagcagcagcaacagcagcagcccctgggacaaggacactgcttcacccgggtctgagaccgcagccccgagtcctggccttcccatcccgcgtggtacaccacccacaaagacccagagacccttcccggcatctcctattcaggacccaccacccggacacctgcctttcagagcccaccccacagcccagaggacctgagataccccaacatttcagatccgcaccttcaggaaatgccccacctgaagcttactgggggtcacgctcctccagaaagaggcctccttccacagctcacactggtctgaccccttctcatgccagtgattgcctggaaggaggtggaaggtgcccaggggccctgcagtcttacctggaacatctccatccttggtgcgtcccctgcctcgtgtacctggctttatacctcggggttgtgggggcggcaaggccaccaggaggtgataggatgctggggtgagctcgacactaacccctcggggggcaagaggtagacaaggccaggggggcgcaggagtggctcagcggagcgccccagccctctcctctcactggtccagcgccaagggtgaggcggagaccacggtgaagtgacctcagagactcagtcgtcgagtgctagggactagtcgaggctggaggcacagggagtagggtgtaggaaggcctgcctctgcctatggtggggtcctgggagccaggaggaggccgtgacccgagaaaggtgctggactgaagcctcaaccctcctctacttgaggctttcctgcaccacagtccaacctcccaggaggggcgcggcttcggacttagtttctgcccaatgagagagggcctccccgtgactgtgctgccagggaagccacttgaccctggtgccgccaacgagggattcagcccgagccccacctctcccttagggacctccgcccaccctaccctcaagccaggatgcccggagctgtccccggaaatgcgtgtgcttcaggtgatttaactgattattgaataggcccgcaggaggtgtgtcctgcccatggggccgaagcctcggaggacattatctggacttagtcccttccccgcgatgccatcaagctggacaattttaaggtctgtttctttcccaatgtagggtataggttggcacagggaagagggctagaaacctgacttgagctccccgcccagggctgaactctccagcatcctgatcacttctcattgaaccttgcttatactccccgtgtgatcggtagctctttatctcaaaacagaatattctaagccaacccctgcctgctctcaccaagtaagatttctcatttgaaccccagctcccagatacttaaaggccttctgtagaccatgtcctcaaggtcccctggccatctgcttgcatgttccagtttccctcctcccccatgcacatcgtgaaatgtgccctcccactccccaggatgagcaaggtggtgtcctctgtgactgagcagtcagcaacttaacaccaaaggtcaccaatgatcaaatccatgagagttgatccgaggagttatgtattagggctacgaaagagtaaacactcagtaaatagtggctattattattatcatcatcatcatcatcatcatgattaccctcaagttcccctgggagagctcctattcaaccttcaaaaccacatgtggtggcacccatcctgcagagattgagctcaaattcagagagttgtgattttgtgatgatttgatgagttccccaactggggtccgtccgtagagcagctgggccaaccctgaggtctctcagcatccagctctgttctttttctgcctgaccagttcctgggtataagtctcaggcccggccagtccggctgaggagtgtgcagacacaggctgtgccagtttgaatccatcgccagtccacacggccctgggcatcagcggtcaatgcccgcacataggactgcttggccttgcactcagacacccagtgccccccggtccacaccccggcggcagccccctccacctacccccgggccaccttcctcagatttatcggcctcgaagtgggcaacaaagaagtgctggcggagggaactgccgacagctgcaggcacctcgcccaacacctccacctcgagcacacccaagtccacagcagtccaggggtctgtcacccagacactgactgcatcgcacacggccagctcaccctgatgactcgccggtgaagtatcgctcacccctcgctggctgcggttggcccgggcgcctgctgactcccgaaaggctccagtctccagcaggaagaccagagggggcccggcagcggcacccctagacaggaccactcgggggaaaagaaggtcccactctggaggaggaaaaggcgacaatgtcgaggatggggttaggactccattgacacactggggaggaggaaaatgagggggatgcggagggagcctgggggagtgggagcatctctcagagcatctctcagagcacatggagacagggaaaaggaggctgggattagagaagaggataaacacttcagtggggtcagaagttggaaaccccaggggaggcctgcctgccaggattatggggaagcccttgctctagaagtttgggggactccatatataggacttgcatcacacccaacttgtagattaataataaatattcaacaactacaggtcaggcactatggctcacacctgtaatcccagcactttgggaggctgaggcgggtggatgacttgaggtcaggagttcgagagcagcctggccaacactgtgaaacaacatctctactgataataccaaaattagccaggcctggtgctgcacgcctgtggtctcagctactcaggaggctgaggcaggagaatcgcttgaacccgggaggccgagattgcagtgagccaagatggtgccactgcacttccgcctggacaacagagtgagactctgtctcacaaaaaaaataaaaataaaaataaggccgggcatggtggctcacacttgtaatgccagcattgtcggaggctgcagtgggtggatcagctgaggtgaggagttccagaccagcctgaccaacatagagaaaccgcacctctactaaaaatacaaaatatcctccagcgtggtgctgcatgcttataatcccagctacttgggaggctaaggcaggagaatcacttgatcccaggaggcagaggttgcagtgagccaagatcgcgccattgcacttcagcttgggcaacaaaaacaaagctccatcttaaaaaaataataataataatcataaaataaagataaaaatgttcggccgggtgcagtggttcacgcctgcaatcccagcgctttgggaggccgaggtgggtgcatcacctgaggtcaagactttgagaccagcctggccaacatggtgaatccctgtctctactaaaaaaaaaacacaaaaattagctgggtatggtggtgcgcacctgtactcccagctactcaggaggctgaggcaggagaatcgcttggacccatgaagcagaggtgtagtgagccgagagcgcgccactgcactccagcctaggtgacagggccagactccgtctcaaaaaaaataaaaataaaaataaaataaaaataaaagtagaaaatattcaactactattactcaatagcaacagatggtaaaatacaggctcagagaaattaatgatttgtgcctggtcacacagccaacaaatggcagagatgggacttcacctctgggcaactgcactctgctatccttcctgtagaactctgaggaaccgagggtcttgcaccctggaggatgttccaatcaatttttttttgagggggtgtctcacttgtcgcccaggctggactgcagtggcgcgatctcggctaactgcaggtccacctcccgggtttacaccactctcctgcctcagcctcccgagtagctgggactacaggcacccaccactatgcctggctaatttgttgtattttttagtagagacggggtt[133 bp omitted]gcctcactctgtctggccaggctggagtacagtggcacaatcctggctcactgtagcgcctgcctcctgggttcaagtgactctcctgcctcagccttctgagtaactggaattacaagcgcctgccaccgtgccctgctaatttttgtatttttagtagagatgcagtttcacaacattggccagactggtctcaaactcccaacctccagtgatactcctgccctggcctcccagagtgctgggattataggcctgagaaaccacgcctggccccaaacaaattgctttaagacgaggtctccctatgtttccccactgcacttgaactcctgggctcaagccatcctcctgctgtggctcctgagtagctgggactacagactcaagccaccacgcctggccacattccacaatttagagaaagtgcacaacctggaatcctagggagaccccgattcacctcaaaactgccactaaggaggtaaaacgctgcccctctgaggcaggcttcagtttccctgtgtgtgaaattgacctggcgctgggagaggctggtggaggcgcggattttgcagtttccctacaacattctggaagcctgtggttctgggaaaggttggcgtggagaagactgggaaacaaccagtggtcaccagagctgtagcacctcctccacctccgagctctggggctgggaaccccaggcttcggggcccctgtggaggacgcaggtggccccctctttcctgacatctcaggagagggaggggcaaccggctagcagaagaaaagcacaggaaggttatacagccaggtggggaaggggccaaatccctgaacaaccccttcccagagttcctcttcaagtgcagggtacccaagagtcaaggccccgccccctttccagaggccccttttctacccaggtgatgggtcctagctgggatgggaggcagatggacggaggggaggggggaggaggggaagggagaggcagtggatgaaggaggatggaagagatgacatccccctcggcccattcatcccattcaggtccccaagccgcgcccctctccgccccacctgcactgccagtgccaacatcagagggaggaagagggagctcggcttagaaggctgaggccctgccacctgggccacaccgatcacgtggccttccttctccccacagaaggccagaccatggacacctcctgagctggaggtcatcctgcatctccaccctgttttctttttctttctttctttctttttttttttttttttgagatggagtctcgctctgtcgtggaggctggagtgcagtggcgcgatctctgctcactgcaagctccccctcctaggttcactccattctcctgcctca[133 bp omitted]ggcctcccaaagtggtgggattacaggagcgcagcaccacgcccagctaattttggtattaacagtagagatgttgtttcacagtgttggccaggctgcttttgaactcctgacctcaagtcaaacacccgcctcagcctcccaaagtgctgggaccacaggtgtgagccatagtgcctgacctgtagttgttgaatatttattattaatctacaagttgggtgtgatgcaagtcccatacatggagtcccccaaacttctagagcaagggcttccccataatcctggcaggcaggcctcccctggggttcccaacttctgacctcactgaagtgtttatcctcttctctaatcccagcctccttttccctgtttccatgtcctctgagagatgctcccgctcccccaggctccctctgcatccccctcatttgcttcctccccagtgtgtcaatggagtcctaacccccacccttgacattgtccccttttcctcctccagagtgggaccttattttcccccaagtggtcctgtctaggggtgccgctgccgggccccctctggtcttcctgctggagactggggccttttgggagtcagcaggcacccgggccaaccgcagccagcgaggggtgagcgatacttcaccggcgagtcatcagggtgagctggccgtgtgcgatgcagtcagtgtctgggtgacagacccccggaccgctgtggacttggttgtgctcgaggtggaggtgttgggtgaggtgcctgcagctggcagcagttccctccaccaacacttctttgtcacctgcttcaaggccgataactctgaagaaggtggcccaggggtaggtggaggggctgccgctggggtgtggaccggggggcactgggtgtctgagtgcaaggccaagcagtcctatgtgcgggcattgaccgctgatgcccagggccgtgtggactggcgatggattcaaactggcacagcctgtgtctgcacactcctcagccggactggccgggcctgagacttatacccaggaactggtcaggcagaaaaagaacagagctggatgctgagagacctcagggttggcccagctgctctacggacggaccccagttggggaactcatcaaatcatcgcaaaatcacaactctctgaatttgagctcaatctctgtaggatgggtgcaacaacgtggggttttgaaggttgaataggagctctcccaggggaacttgagggtaatcatgatgatgatgataataataatagccactatttactgagtgtttactctttcgtagccctaatacataactcctcggatcaactctcatggatttgatcattggtgacctttggtgttaagttgctgactgctcagtcacagaggacaccaccttgctcatcctggggagtgggagggcacatttcacgatgtgcatgggggaggagggaaactggaacatgcaagcagatggccaggggaccttgaggacatggtctacagaaggcctttaagtatctgggagctggggttcaaatgagaaatcttacttggtgagagtgggcaggggtcggcttagaatattttgttttgagataaagagctaccgatcacacggggagtataagcaaggttcaatgagaagtgatcaggatgctggagagttcagccctgggcggggagctcaagtcaggtttctagccctcttccctgtgccaacctataccctacactgggaaagaaacagaccttaaaattgtccagcttgatggcatcgcggggaagggactaagtccagataatgtcctctgaggctgaggcctcgggggcaggacacacctcctgcgggcctattcaataatcagttaaatcacctgaagcacacgcatttccggggaccgctccgggcatcctggcttgagggtagagtgggcagaggtccctaagggagaggtggggctcgggctgaatccctcgttggcggcaccagggtcaagtggctaacctggcagcacagtcacggggaggccctctctcattgggcagaaactaagtccgaagccgcgcccctcctgggcgaggaggttccacctcctaggttcctgtgattctcctgcctcagcccgagtagtgggacatcccacttgctcccgccattctgtttaccacaggtgacgaccgccatggctgacaggcagggaggtcccccgaggaccgagcaagcctcggtctcccaaaaaaaaaaaagatacattgaagtaatttaaaaacacttaggaagatgtcatttcttcctatcaaggcgtcctccctttatgttttgttattatatagggaacgataaaaaaatttttttctcaaccaatgtggacccggttggcctcgaactcgtaccctcgaaccctcccctccctgagggcccgagggcacgcgcaaccggtcggagccacaatagctcggggtgtcggggatctcctttcttccttttgaccttacgcagggtgatggagccaatcaggagaggctcacccctgacgtcacccagtccccagggccagtgagggccctgcgttccgtggcgccccctggagggaggaaggggaactgtatctgagagagagcagccaattgggtccgctgactccggccgggttcccgtgccgcgtccaacacccctcactccctgtctcactcccccacggagactcaatttactttccatgtccacatccccagtgcttgcggaagatatcccgctaagagagagacatgtcaaaggtagggtagatcgacatttccaggcaccaaagatggagatgttccaggaaagactgcagggcccctgggcaccttccacctgcttccaggccatcactggcatgagaaggggcagaccagtgtgagctgtggaaggaggcctctttctggaggagcgtgacccccagtaagcttcaggtggggcagttcctgagggtggggatctaaaatgttggggtatctgagatcctctgggctgtggggtgggctctgaaaggcaggtgtccgggtggtgggtcctgaataggagatgccacgaagggtctctgggtctttgtgggtggtgtaccacgcgggatgggaaggccaggactcggggctgcggtctcagacccgggtgaagcagtgtccttgtcccaggggctgctgctgttgctgctgctgagcatgggcgggacatgggcatccaaggagccgcttcggccacggtgccgccccatcaatgccaccctggctgtggagaaggagggctgccccgtgtgcatcaccgtcaacaccaccatctgtgccggctactgccccaccatggtgagctgcccggggccggggcaggtgctgccacctcagggccagacccacagaggcagcgggggaggaagggtggtctgcctctctggtcaggggctgcggaatggggtgtgggagggcaggaacagagggcttcctggacccctgagtctgagacctgtgggggcagctggggagctcagctgaggcgctggccccaggcacatgctcattctcccactcacacggcttccagacccgcgtgctgcagggggtcctgccggccctgcctcaggtggtgtgcaactaccgcgatgtgcgcttcgagtccatccggctccctggctgcccgcgcggcgtgaaccccgtggtctcctacgccgtggctctcagctgtcaatgtgcactctgccgccgcagcaccactgactgcgggggtcccaaggaccaccccttgacctgtgatgacccccgcttccaggcctcctcttcctcaaaggcccctccccccagccttccaagcccatcccgactcccggggccctcagacaccccgatcctcccacaataaaggcttctcaatccgcactctggcggtgtctttctgtgggctcagggcaaccacacacacagggtgggtccagcttccaaaccattttatacagagtcacagtacagaactctggtagaaaacagggtggacggctgggcgtggtg[131 bp omitted]gtggcgggcgcttgcaggagaatgcagtgaacctgggagcgggaggttgcagtgagcagagatcgcgccactgcactccagcctgcacgacagagcgagactccatctcaaaaaaaaaaaaaaaagaaagaaagaaagaaaaagaaaagagggtggagatgggggatgacatccagctcaggaggtgtccatggtctggccttccgtggggagaaggaaggccacacgattggtgtggcccagggggcagggcctcagcattctaagccgagctccctcttccaccctctgaggttggcactggcagtccaggtgggggcttggggacctgaatgggatgaatgggccaagggggatgtcatctcttccattctccttcatccactgcctctcccttcccctcctcccccccctcccacccccggtccatctacctcccatcccagccaggagccgtcacctaagtagaaaaggggcctctggaaagggggcggggccttgactcttgggtaccctgcgcttgaagaggaactctgggaaggggttgttcagggatttggccccttccccacctggctgtataaccttcctgttcttttcttcccctagccggttgcccctccctgtcctgagatgtcaggaaagagggggccacctgcgtcctccacagtggcctccgaagcctggggttcccagccccagagctcagaggtgaaggaggtgctacagctctggtgaccactggttgtttcccagtcttctccatgccaccctttcccaaaacaacaaaacaaacaaacaaaattgggcctggcgcagtggttcatgcctgtaatcccagcactttgggaagccgagacgggcggatcacaaagtcaggagatcaagactatcctggctaacatggggaaactccgtctctactaaaaaatacaacaaattagccaggcgtcctggtgggcgcctgtagtcccagctacttgggaggccgaggcaggagaatggcaggaacccgggaggcggatcttgcagtgagccgagatcgcgccactgcagtccagtctcaacaacagagcgagactccgtctcaaaaaaaaaaaaaaaattgattggaacatcctccaagatgcaagactctcagttcctcagagttctacaggaaggatggcagagtgcagttgcccagagttgaagtcccatctctgccatttgttggctgtgtgaccaggcacaaatcattaatttctctgagcctgtattttaccatctgttgctattgagtaatagtagtggactattttctatttttatttttattttatttattttatttttttttgagacggagtctcgccctgtcacccaggctggagtgcagtggcgtgatctcggctcactgcacctatgcttcccgggttcaagcgattctcctgcctcagcttcctgagtagctggaactacaggcgcgcaccaccacacccagctaatttttttttttttttttagtagagacagggtttcaccatgttggccaggctggtctcgaagtcctgaactcaggtgatgcacctgcctcggcctcccaaagtgctgggattgcaggcatgagccactgcgcctggacgaacgtttttaattatattattattattattattattattattattactaatttttgagatggagctttgtttttgttgcccaggctgaagtgcaatggcgggatcttggctcactgcaacctccgcctcctaggatcaagagattctcctgcctaagcctcccaagtacctgggagtataggcatgcaccaccacgcccgacgatattttgtaattttagtagagatggggtttctccatgttggtcatgttggtctggaacccctcacctcagctgatccacccaccgcagcctccgacaattacaggcgtgagccaccacgcccagccgtccaccctgttttctaccagagttctgtactgtgactctgtataaaatagtttggaagctggacccaccctgtgtgtgtgattgccctgagcccacagaaagacacctccagagtgcggattgagaagcctttattgtgggaggatcggggtgtcctagggccccgggagacgggatggacttggaaggctggggggaggggcctttgaggaagaggagtcctggaagcgggggtcatcacaggtcaaggggtggtccttgggacccccgcagtcagtggtgctgcggcggcagagtgcacattgacagctgagagccacggcgtaggagaccacggggttcacgccgcgcgggcagccagggagccggatggactcgaagcgcacatcgcggtagttgcacaccacctgaggcagggccggcaggaccccctgcagcacgcgggtctggaagccgtgtgagtgggggaatgagcatgtgcctggggccagcgcctcagctgagctccccagctgcccccacaggtctcagactcaggggtccaggaagccctctgttcctgccctcccacaccccattccgcagcccctgaccagagaggcagaccacccttcctcccccgctgcctctgtgggtctggccctgaggtggcagcacctgccctggccccgggcagctcaccatggtggggcagtagccggcacagatggtggtgttgacggtgatgcacacggggcagccctccttctccacagccagggtggcattgatggggcggcaccgtggccgaagcggctccttggatgcccatgtcccgcccatgctcagcagcagcaacagcagcagcctctggggcaaggacactgcttcacccgggtctgagactgcagcccccagtcctggccttcccatcccgcatggtacaccacccacaaagacccagagacccttcccggcatcttctattcaggacccaccacccggacacctgcctttcagagcccaccccacagcccagaggacctgagataccccaacatttcagatccgcaccctcaggaactgacccacctgaagcttactgggggtcacgctcctccagaaagaggcctccttccacagctcacacgggtctgccccttctcatgccagtgatggcctggaaggaggtggaaggtgcccaggggccctgcagtctttcctggaacatctccatctttggtgcccggaaatgtggatctaccctacctttgacatgtctctctcttagcgggatatcttccgcaagcactgggaatgtggacatggaaagtaaattgagtctccgtgggggagtgagacagggagtgaggggtgttggacgcggcacgggaacctggccagagtcagcggacccaattggctgctctctctcagatgcagttccccttcctccctccagggggcgccacggaacgcagggccctcactggccctggggactgggtgacgtcagggatgagcctcttgtgattggctccatcaccctgcgtaagatcaaagggaagaaaggatgggcccgacaaccggagccattgtggctccggccgattgagcctgccctcgggctctcaaggctaggcgagggtgtgagggactggagttcgaggtcaacctgggccccattggtaggaaaaaaaaaaaaaatttttttatcgttccctatataacaacaaaacataaagggaggacgccttgataggaagaaatgacatcttcctaagtgtttttaaattacttcaatgtatctttttttttttttttgggataccgagccttgctcggtcctcgggggacctccctgcctgtcagccatggcggtcgtcacctgtggtaaacagaatggcgggagcaagtgggatgtcccactactcgggctgaggcaggagaatcacaggaacctaggaggtggaacctcctcgcccaggaggggcgcggcttcggacttagtttctgcccaatgagagagggcctccccgtgactgtgctgccaggttagccacttgaccctggtgccgccaacgagggattcagcccgagccccacctctcccttagggacctctgcccactctaccctcaagccaggatgcccggagcggtccccggaaatgcgtgtgcttcgggtgatttaactgattattgaataggcccgcaggaggtgtgtcctgcccccgaggccgcagcctcggaggacattatctggacttagtcccttccccgcgatgccatcaagctggacaattttaaggtctgtttctttcccaatgtagggtataggatggcacagggaagagggctagaaacctgacttgagctccccgcccagggctgaactctccagcatcctgatcacttctcattgaaccttgcttatactccccgtgtgatcggtagctctttatctcaaaacagaatattctaagccaacccctgcctgctctcaccaagtaagatttctcatttgaaccccagctcccagatacttaaaggccttctgtagaccatgtcctcaaggtcccctggccatctgcttgcatgttccagtttctctcctcccccatgcacatcgtgaaatgtgccctcccactccccaggatgagcaaggtggtgtcctctgtgactgagcagtcagcaacttaacaccaaaggtcaccaatgatcaaatccatgagagttgatccgaggagttatgtattagggctacgaaagagtaaacactcagtaaataatggctattattattatcatcatcatcatgattaccctcaagttcccccgggagagttcctattcaaccttcaaaaccccacattgttgcacccatcctacagagattgagctcaaattcagacagttgagattttgcgatgatttgatgagttccccaactggggtccgtccgtagagcagctgggccaaccctgaggtctctcagcatccagctctgttctttttctgcctgaccagttcctgggtataagtctcaggcccggccagtccggctgaggagtgtgcagacacaggcagtgccaatttgaatccatcgccagtccacacggccctgggcatcagtggtcaatgcccgcccataggactgcttggccttgcactcagacacccagtgccccccggtccacaccccggcggcaggtcctccacctacccccgggccaccttccttagatttatcggcctcgaagcgggtaacaaagaagtgctggcggagggaactgctgccagctgcaggcacctcacccaacacctccacctcgagcacacccaagtccacagcagtccaggggtctgtcacccagacagtgactgcatcgcacacggccagctcaccctgatgactcaccggtgaagtatcgctcaccccacgctggctgcggttggcccgggcgcctgctgactcccgaaaggctccagtctccagcaggaagaccagagggggcccggcagcggcacccctagacaggaccactcgggggaaaagaaggtcccactctggaggaggaaaacgcgacaatgtcgaggatggggttaggactccaatgacacactggggaggaggaaaatgagggggatgcggagggagcctgggggagcaggagcatctctcagagcatctctcagagcacatggagacagggaaaaggaggctgggattagggaagaagataaacacttcagtggggtcagaagttgggaaccccaggggaggcctgcctgccaggattatggggaagcccttgctctagaagtttgggggactccatataaaggacttgcatcacacccaacttgtagattaataataaatattcaacaactacaggtcaggcactatggctcacacctgtagtcccagcactttgggaggctgaggcgggtgtttgacttgaggtcaggagtttgagagcagcctggccaacactgtgaaacaacatctctactgataataccaaaattagctgggcgtggtgctgcgctccagtaatcccaccactttgggaggcc[133 bp omitted]tgaggcaggagaatggagtgaacctaggagggggagcttgcagtgagcagagatcacgccactgcactccagcctccacgacagagcgagactccatctcaaaaaaaaaaaaaagaaagaaagaaagaaaaagaaaacagggtggagatggaggatgacctccagctcaggaggtgtccatggtctggccttctgtgggggaaggaaggccacatgatcggtgtggcccaggtggcagggcctcagccttctaagccgagctccctcttcctccctctgacgttggcactggcagtgcaggtggggcggggtggggggcgcggcttggggacctgaatgggatgaatgggccgagggggatgtcatctcttccatcctccttcatccactgcctctcccttcccctcctcccccctcccctccgtccatctgcctcccatcccagctaggacctgggtagaaaaggggcctctggaaaggggacggggccttgactcttgggtaccctgcacttgaagaggaactctgggaaggggttgttcagagatttggccccttccccatctggctgtataaccttcctgtgcttttcttctgctagccggttacccctccctctcctgagatgtcaggaaagagggggccacctgcgtcctccacagtggtccccgaagcctggggttcccagccccagagctccgaggtggagggggtgctacagctctggtgaccactggttgtttcccagtcttctccacgccaacctttcccagaaccacaggcttccagaatgttgtagggaaactgcaaaatccgcgcctccaccagcctctcccagcgccaggtcaatttcacacacagggaaactgaagcctgcctcagaggggcagcgttttacctccttagtggcagttttgaggtgaatcggggtctccctaggattccaggttgtgcactttctctaaattgtggaatgtggccaggcgtggtggcttgagtctgtagtcccagctactcaggagccacagcaggaggatggcttgagcccaggagttcaagtgcagtggggaaacatagggagacctcgtcttaaagcaatttgtttggggccaggcgtggtttctcaggcctataatcccagcactctgggaggccagggcaggagtatcactggaggttgggagtttgagaccagtctggccaatgttgtgaaactgcatctctactaaaaatacaaaaattagcagggcacggtggcaggcgcttgtaattccagttactcagaaggctgaggcaggagagtcacttgaacccaggaggcaggcgctacagtgcgccgggattgtgccactctactccagcctggccagacagagtgaggctct[132 bp omitted]aaaccccgtctctactaaaaaatacaagaaattagccaggcatggtggcgggcgcctgtagtcccagctactcgggaggctgaggcaggagagtggtgtgaacctgggaggcggagcttgcagtgagccgagattgagccactgcagtccagcctgggtgacaagtgagactccccctgaaaaaaaaaaaaattgattggaacatcctccaggatgcaagactctcggttccttagagttctacaggaaggatggcagagtgcagtcgcccagaggtgaagtcccatctctgccatttgttggctgtgtgaccgggcacaaatcattactttctctgatcctgtattttaccatctgttgctattgagtaatagtagttgactattatgtatttttatttatttttatttttatttttatttttgtttgagacagagtctggccctgtcacccaggctggagtgcagtggtgcgctcttggctcactgcatctctgcttccggggttcaagcgattctcctgcctcagcctcctgagtagctgggagtacaggtgcccaccaccacacccagctaatttttgtattttttttagtagagacagggattcaccatgttggccaggctggtctcaaagtcctgacctcaagtcatccacccgcctcagcctcccaaagtgctgggattacaggtgtgggccataatgcctgacctgtagttgttgaatatttactattaatctacaagttgggtgttatgcaagtcctatatatggagtcccccaaacttctagagcaagggcttccccataatcctggcaggcaggcctcccctggggttcccaacttctgaccccactgaagtgtttatcctcttctctaatcccagcctccttttccctgtctccatgtgctctgagaggtgctctgagagatgctcccgctcccccagactccctctacatccccctcattttcttcctctccagtgtgtcaatggggtcctaaccccaccctcgacattgtcgccttttcctgatccaaagtgggaccttcttttcccctgagtggtcctgcctaggggtgccgctgccgggccccctctggtcttcctgctggagactggggcctttcgggagtcagcaggcgcccgggccaaccgcagccagcgaggggtgagcaatacttcactggcgagtcatcagggtgaggctggccgtgtgtgatgcagtcactggctgggtgacagacccccggaccgctgtggactcaggtgtgctggaggtggaggtgttgggcgaggtgcctgcagctggcggcagttccctctgccaacacttctttgtcacctgcttcgaggccaataactctgaagaaggtggcccaggggtaggtggaggggctgccgcagggtgtggaccggggggcactgggtgtctgagtgcaaggccaagcagtcctatgtgcgggcattgaccgctgatgcccagggctgtgtggactggtgatggattcaaattggcactgcctgtgtctgcacactcctcagccggactggccgggcctgagacttatacccaggaactggtcaggcagaaaaagaacagagctggatgctgagagacctcagggttggcccagctgctctacggaccccagtttgggaactcatcaaatcatcacaaaatcacaactctctgaatttgagctcaatctctgcaggatgggtgccaccacatggggttttgaaggttgaataggagttctcctgggggaacttgaggataatcatgatgatgatgataataataataggcactatttactgagtgtttactctttcttagccataatacataactcctcggatcaactctcatggatttgatcattggtgacctttggtgttaagttgctgactgctcagtcacagaggacaccaccttcctcatcctggggagtgggagggcacatttcacgatgtgcatgggggaggagagaaactggaacatgcaagcagatggccaggggaccttgagaacatggtctacagaaggcctttcagtatctgggagctggggttcaaatgagaaatcttacttggtgagagtgggcaggggtcggcttagaatattttgttttgagataatgagctaccgatcacagggggagtttaagcaaggttcaatgagaagcgatcaagatgctgcacagttcagccctgggtggggagctcaagtcaggtttctagccctcttccctgtgccaacctataccctacattgggaaagaaacagaccttaaaattgtccagcttgatggcatcgcggggaagggactaagtccagataatgtcctctgaggcttcggccccgtgggcaggacacacctcctgcgggcctattcaataatcagttaaatcacctgaagcacacgcatttccggggaccgctccgggcatcctggcttgagggtagagtgggcggaggttcctaagggagaggtggggctcgggctgaatccctcgttggggggcatctgggtcaagtggcttccctggcagcacagtcacggggaggccctctctcattgggcagaagctaagtccgaagccgcgcccctcctgggaggttggactgtggtgcaggaaagcctcaagtagaggagggttgaggcttcaatccagcactttgctcgggtcacggcctcctcctggctcccaggaccccaccataggcagaggcaggccttcctacaccctactccctgtgcctccaggctcgactagtccctagcactcgacgactgagtctctgagatcacttcaccgtggtctccgcctcacccttggcgctggaccagtgagaggagagggctggggcgctccgctgagccactcctgcgcccccctggccttgtctacctcttgccccccgaagggttagtgtcgagctcaccccagcatcctacaacctcctggtggccttgccgcccccacaaccccgaggtataaagccaggtacacgaggcaggggacgcaccaaggatggagatgttccaggtaagactgcagggcccctgggcaccttccacctccttccaggcaatcactggcatgagaaggggcagaccagtgtgagctgtggaaggaggcctctttctggaggagcgtgacccccagtaagcttcaggtggggcagttcctaagggtggggatctgaaattttggggcatctcaggtcctctgggctgtggggtgggctctgaaaggcaggtgtccgggtggtgggtcctgaataggagatgccgggaagggtctctgggtctttgtgggtggtgtaccacgcgggatgggaaggccaggactcggggctgcggtctcagacccgggtgaagcagtgtccttgtcccaggggctgctgctgttgctgctgctgagcatgggcgggacatgggcatccaaggagccgcttcggccacggtgccgccccatcaatgccaccctggctgtggagaaggagggctgccccgtgtgcatcaccgtcaacaccaccatctgtgccggctactgccccaccatggtgagctgcccggggcccgggcaggtgctgccacctcagggccagacccacagaggcagcgggggaggaagggtggtctgcctctctggtcaggggctgcggaatggggtgtgggagggcaggaacagagggcttcccggacccctgagtctgagacctgtgggggcaactggggagctcagctgaggcgctggccccaggcacatgctcattcccccactcacacggcttccagacccgcgtgctgcagggggtcctgccggccctgcctcaggtggtgtgcaactaccgcgatgtgcgcttcgagtccatccggctccctggctgcccgcgcggcgtgaaccccgtggtctcctacgccgtggctctcagctgtcaatgtgcactctgccgccgcagcaccactgactgcgggggtcccaaggaccaccccttgacctgtgatgacccccgcttccaggactcctcttcctcaaaggcccctccccccagccttccaagtccatcccgactcccggggccctcggacaccccgatcctcccacaataaaggcttctcaatccgcactctggaggtgtctttctgtgggctcagggcaatcacacacacacaggatgggtccagcttccaaaccattttatacagagtcacagtacagaactctggtagaaaacagggtggacggctaggcgcggtggctcacgcctgtaattgtcggaggctgtggtgggtggatcagctgaggtgaggggttccagaccagcctgaccaacatggagaaaccccatctctactaaaaatagaaaacatcgtcgagcgtggtggtgcatgcctatactcccaggtacttgggaggctaaggcaggagaatctcttgatcctaggaggcggaggttgcagtgagccaagatcccgccattgcacttcagcctgggcaacaaaaacaaagctccatctcaaaaagtaataataataataataataaaataaaaattaaaaacgttcgtccaggcgcagtggctcatgcctgcaatcccagcactttgggaggctgaggcgggtgcatcacctgagttcaggactttgagaccagcctggccaacatggtgaaaccctgtctctactaaaaaaaaaaaaaaattagctgggtgtggtggtgcgcgcctgtagttccagctactcaggaagctgaggaaggagaatgacttgaaccccggaagcataggtgcagtgagctgagatcacgccactgcactccagcctgggtgacagggtgagactccgtctcaaaaaaaataaataaataaaataaaataaaaataaaaatagaaaatagtccactactattactcaatagcaacagatggtaaaatacaggctcagagaaattaatgatttgtgcctggtcacacagccaacaaatggcagagatgggacttcaactctgggcaactgcactctgccatccttcctgtagaactctgaggaactgagagtcttgcatcttggaggatgttccaatcaatttttttttttttgagacggagtctcgctctgttgttgagactggactgcagtggcgcgatctcggctcactgcaagatccgcctcccaggttcctgccattctcctgcctcggcctcccaagtagctgggactacaggcgcccaccaggacgcctcgctaatttgttgtattttttagtagagacggggtttccccgtgttagccaggatagtcttgatctcctgactttgtgatccgcccgtctcggcttcccaaagtgctgggattacaggcatgaaccactgcgccaggcccaattttgtttgttttgttttgttttgttgtttttggaaagggtggcatggagaagactgggaaacaaccagtggtcaccagagctgtagcacctccttcacctctgagctctgctgggaaccccaggcttcgggggccactgtggaggacacaggtggccccctctttcctgacatcgcaggagagggagcagcaaccggttaggggaagaaaagcacaggaaggttatacagccaggtggggaagaggccaactccctgaaaaaaccccttcccagagttcctcttcaagcgcagggtacccaagagtcaaggccccgccccctttccagaggccccttttctacttaggtgatggctcctggctgggatgggaggtagatggaccgggggtgggaggggtggaggaggggaagggagaggcagtggatgaaggagaatggaagagatgacatcccccttggcccattcatcccattcagatccccaagcccccacctggactgccagtgccaacctcagagggtggaagagggagctcggcttagaatgctgaggccctgctccctgggccacaccaatcgtgtggccttccttctccccacggaaggccagaccatggacacctcctgagctggatgtcatcccccatctccaccctcttttctttttctttctttctttcttttttttttttttttgagatggagtctcgctctgtcgtgcaggctggagtgcagtggcgcgatctctgctcactgcaacctcccgctcccaggttcactgcattctcctgcaagcgcccaccac[131 bp omitted]caccacgcccagccgtccaccctgttttctaccagagttctgtactgtgactctgtataaaatggtttggaagctggacccatcctgtgtgtgtgtggttgccctgagcccacagaaagacacctccagagtgcggattgagaagcctttattgtgggaggatcggggtgtccgagggccccgggagtcgggatggacttggaaggctggggggaggggcctttgaggaagaggagtcctggaagcgggggtcatcacaggtcaaggggtggtccttgggacccccgcagtcagtggtgctgcggcggcagagtgcacattgacagctgagagccacggcgtaggagaccacggggttcacgccgcgcgggcagccagggagccggatggactcgaagcgcacatcgcggtagttgcacaccacctgaggcagggccggcaggaccccctgcagcacgcgggtctggaagccgtgtgagtgggagaatgagcatgtgcctggggccagcgcctcagctgagctccccagctgcccccacaggtctcagactcaggggtccgggaagccctctgttcctgccctcccacaccccattccgcagcccctgaccagagaggcagaccacccttcctcccccgctgcctctgtgggtctggccctgaggtggcagcacctgccccggccccgggcagctcaccatggtggggcagtagccggcacagatggtggtgttgacggtgatgcacacggggcagccctccttctccacagccagggtggcattgatggggcggcaccgtggccgaagcggctccttggatgcccatgtcccgcccatgctcagcagcagcaacagcagcagcccctgggacaaggacactgcttcacccgggtctgagaccgcagccccgagtcctggccttcccatcccacgtggtacaccacccacaaagacccagagacccttcccggcatctcctattcaggacccaccacccggacacctgcctttcagagcccaccccacagcccagaggacctgagataccccaacatttcagatccccaccttcaggaaatgccccacctgaagcttactgggggtcacgctcctccagaaagaggcctccttccacagctcacactggtctgccccttctcatgccagtgattgcctggaaggaggtggaaggtgcccaggggccctgcagtcttacctggaacatctccatccttggtgtgtcccctgcctcgtgtacctggctttaaacctcggggttgtgggggcggcaaggccaccaggaggttgtaggatgctggagtgagctcgacactaacccttcggggggcaagaggtagacaaggccaggggggcgcaggagtggctcagcggagcgccccagccctctcctctcactggtccagcgccaagggtgaggcggagaccacggtgaagtgacctcagagactcagtcgtcgagtgctagggactagtcgagcctggaggcacagggagtagggtgtaggaaggcctgcctctgcctatggtggggtcctgggagccaggaggaggccgtgacccgagaaaggtgctggactgaagcctcaaccctcctctacttgaggctttcctgcaccacagtccaacctcccaggaggggcgcggcttcggacttagcttctgcccaatgagagagggtctccccgtgactgtgctgccagggaagccacttgaccctggtgcccccaaggagggattcagcccgagccccacctctcccttagggacctccgcccactctaccctcaagccaggatgcccggagctgtccccggaaatgcgtgtgcttcaggtgatttaactgattattgaataggcccgcaggaggtatgtcctgcccacggggccgaagcctcggaggacattatctggacttagtcccttccccgcgatgccatcaagctggacaattttaaggtctgtttctttcccaatgtagggtataggttggcacagcaaagagggctagaaacctgacttgcgctccccacccagggctgaactgtgcagcatcttgatcgcttctcattgaaccttgcttatactccccctgtgatcggtagctcattatctcaaaacagaatattctaagccaacccctgcctgctctcaccaagtaagatttctcatttgaaccccagctcccagatacttaaaggccttctgtagaccatgtcctcaaggtcccctggccatctgcttgcatgctccagtttctctccacccccatccacatcgtgaaatgtgccctcccactccccaggatgagcaaggtggtgtcctctgtgactgagcagtcagcaacttaacaccaaaggtcaccaatgatcaaatccatgagagttgatctgaggagttatgtattagggctacgaaagagtaaacactcagtaaatagtggctattattatcatcatcatcatcatgattactctcaatttccccctggagaactcctattcaaccttcaaaaccccacgtggtggcacccatcctgcagagactgagctcaaattcagagagttgtgattttgtgatgatttgatgagttcccaaactggggtccgtagagcagctgggccaaccctgaggtctctcagcatccagctctgttctttttctgcctgaccagttcctgggtataagtctcaggcccggccagtccggctgaggagtgtgcagacacaggcagtgccaatttgaatccatcgccagtccacacggccctgggcatcagcggtcaatgcccgcacataggactgcttggccttgcactcagacacccagtgccccccggtccacaccctggcggcagccccctccacctaccccacggctaccttcctcagagttatcggcctcgaagcggtgacaaagaagtgctggcagagggaactgccgccagctgcaggcacctcgcccaacacctccacctcgagcacacccaagtccacagcggtcccgggatctgtcacccagacactgactgcatcacacacggccagcctcaccctgatgactcgccggtgaagcatcgctcgcctcacgctggctgcggttggcccgggcgcctgctgactcccaaaaggccccagtctgcagcaggaagaccagagggggcccggcagcggcacccctagacaggaccactcaggggaaaagaaggtcctactttggatcaggaaaaggtgacagtgccgagggtggggttaggaccccattgacacactggggaggaagaaaatgagggggatgcagagggagcctgggggagcgggagcatctctcagagcacctctcagcacacggagacagggaaaaggaggctgggattagagaagaggataaacacttcagtggggtcagaagttggaaaccccaggggaggcctgcctgccaggattatggggaagcccttgctctagaagtttgggggactccatataaaggacttgcatcacacccaacttgtagattaataataaatattcaacaactacaggtcaggcactatggctcacacctgtagtcccagcactttgggaggctgaggcgggtggatgacttgaggtcaggagttcgagagcagcctggccaacactgtgaaacaacatctctactgataataccaaaattagccaggcctggtgctgcacgcctgtgatctcagctactcgggaggctgaggcaggagaatcgcttgaacccgggagggctgagattgcagtgagccaagatcgtgtcactgcacttcggcctggacaacacagtgagactctctctcaaaaaaaataaataaataaggccgggcatggtggctcacacttgtaatcccagcattgtcggaggctgcagtgggtggatcagctgaggtgaggagttccagaccagcctgaccaacatagagaaaccgcacctctactaaaaatacaaaatatcctccggcgtggtgctgcatgcttataatcccagccacttgggaggctgaggcaggagaatcgcttaatcccaggaggcggagtttgaagtgagccaagatcgcgccattgcacttcagcttgggcaacaaaaacaaagctccatcttaaaaaaataataataataatcataaaataaagataaaaattgttcggccggggacagtggctcttgcctgcaatcccagcactatgggacgccgaggcgggtgcgtcacctgaggtcaggactttgggactagcctggccaacgtggcgaaacgctgtgtctactaaaaaaattacaaaaattagctgggtgtggtggtgcacacctgtagtcccagctactcgggagtctgaggcaggtgaattgcttgaacccgggaagcataggtgcagtgagccaagagcgcgccactgcactccagactgggtgacagggcgagactccgtctcaaaaaaaaaaaaaaaaaaaaagatgaaataaaaataaaaatagaaaatagccaactacaattactcaatagcaacagagggtaaaatacaggctcagagaaattaatgctttttgcctggtcacataggcagcaaatgacagagatgggacttcacctctgggcaactgcattctgccatccttcccgtagaactctgaggaaccgagagtcttgcatcttggaggatgttccaaccaattttttttttttttttttg[131 bp omitted]ccaccacgtctggctaatttattgtattttttagtagagacggggtttccccgtgttagccaggatggtcttgatctgctgaccttgtgatctgcccacctcggcctcccaaagtgctgggataacaggcatgagccactgcgcccggcccaatttttttttgtttgttttgttttgttgtttttttttttttttttgaaacagagtctcactctgtctggccaggctggagtacagtggcacaatcccggctcactgtaacgcctgtctcctggtttcaagcgattctcctgcctcagccttctgagtaactggaattaaaagcacctgccaccgtgcccagctaatttttgtatttttagtagagatgcggtttcacgacattggccagactgttctcaaactcccaacctccagtgatactcctgccctggcctcccagagtgctgggattataggcctgagacaccacgcctggccccaaacaaattgctttaagacgaggtctccctatgtttccccactgcacttgaactcctgggctcaagccatcctcctgctgtggctcctgagtagctgggactacagactcaagccaccatgcctggccacattccacaatttagagaaagtccacaacctggaatcctagggagaccctgattcacctcaaaactgccactaaggaggtaaaacgctgcccctctgaggcaggcttcagtttccctgtgtgtgaaattgacctggcgctgggagaggctggtggaggcgcggattttgcagtttccctacaacattctggaagcctgtggttctgggaaaggttggcgtggagaagactgggaaacaaccagtggtcaccagagctgtagcaactcttccacctcggagctctggggctgggaaccccaggcttcggggaccactgtggaggacgcaggtggccccctctttcctgacatctcaggagagggaggggtaaccggctaggggaagaaaagcacaggaaggttatacagccagatggggaaggggccaaatccctgaacaaccccctcccagagttcctcttcaagtgcagggtacccaagagtcaaggccccgccccctttccagaggccccttttctacttaggtgatggctcctggctgggatgggaggcagatggacggaggggaggggggaggaggggaagggagaggcagtggatgaaggagaatggaagagatgacatccccctcggccccttcatcccattcaagtccccaagccgctccccccccacacctgcactgccagtgccaacgtcagagggaggaagacggagctcggcttaggaggctgaggccctgccccctgggccacaccaatcatgtggccttccttctccccacagaaggccagaccatggacacctcctgagctggatgtcgtcccccatcttcactctcttttctttttctttctttccttctttctttctttctttttttttttttttgagatggagtctcgctccgtcatgcaggctggagtgcagtggtgtgatctcggctcactgcaagctccccctcccaggttcactccattctcctgccacagcctcccaagtagcttggactgcaagcgcccaccac[131 bp omitted]caccgcgccccgccgtccaccctgttttctaccagagttctgatactgtgactttgtataaaatggtttggaagctggacccaccctgtgtgtgtgtggttgccctgagcccacagaaagacaccgccagagtgcggattgagaagcctttattgtgggaggatcggggtgtctgagggccccgggagtcgggatggacttggaaggctggggggaggggcctttgaggaagaggaggcctggaagcgggggtcatcacaggtcaaggggtggtccttgggacccccgcagtcagtggtgctgcggcggcagagtgcacattgacagctgagagccacggcgtaggagaccacggggttcacgccgcgcgggcagccagggagccggatggactcgaagcgcacatcgcggtagttgcacaccacctgaggcagggccggcaggaccccctgcagcacgcgggtctggaagccgtgtgagtgggagaatgagcatgtgcctggggccagcgcctcagctgagctccccagctgcccccacaggtctcagactcaggggtccaggaagccctctgttcctgccctcccacaccccattccgcagcccctgaccagagaggcagaccacccttcctcccccgctgcctctgtgggtctggccctgaggtggcagcacctgcccgggccccgggcagctcaccatggtggggcagtagccggcacagatggtggtgttgacggtgatgcacacggggcagccctccttctccacagccagggtggcattgatggggcggcaccgtggccgaagcatctccctggatgcccatgtcccgcccatgctcagcagcagcaacagcagcagcccctgggacaaggacactgcttcacccgggcctgagaccacagccctgagccctggccttcccatcccccagggtacaccacccacaaagacccagagacccttcccggcatctcctattcaggacccaccacccggacacctgcctttcagagcccaccccacagcccgagggacctgagatgccccaacatttcagatccccaccctcaggaactgccccacgtgaagcttattgggggtcacgctcctccagaaagaggcgtccttccacagctcacactggtctgccccttctcatgccagtgatggcctggaaggaggtggaaggtgcccaggggccctgcagtcttacctggaacatctccatccttggtgcgtcccctgcctggtgtacctggctttatacctcgggtttgtgggggcgtcaaggccaccaggaggttgtaggatgctggagtgagctggacactaacccttcggggggcgagaagtagacaaggccagggaggcacaggagtggctcagcggagcaccccagtcctctcccctcagtggtctagcgccaaggatgaggcggagaccacggtgaagtgacctctgagactcagtcgtcgagtgctagggactagtcgaggctggaggcacagagagtagggtgtaggaaggcctgcctctgcctatggtggggtcttgggaaccaggaggaggccgtgacccgagaaaggtgctggactgaagcctcaaccctcctctacttgagccattcctgcaccacagtccaacctaacaggaggggcgcggcttcggacttagcttctgcccagtgagagagggtctccccgtgactgtgctgccagggaagccacttgacccagatgccccccaacgagggattcagcccgagccccacctctcccttaggaacctccgcccaccctaccctcaagccaggatgcccggagcggtccccggaaatgcgtgtgcttcaggtgatttaactgattattgaataggcccgcaggaggtgtgtcctgcccgcggggccgcagcctcggaggacattgtctggacttagtcccttccccgcgatccagccgcagctgagtgggcgtgtctgggctagtcctgtccccacactgcggatagacttaatgagtgcgagcccacctaggtccgacaccgcgtagtgagcggctgcccagagctctgctccgcccccacgccagggggcgtgtctggggtggggctggcccggcaggctcccactagccccggcttacagcggcctgagcgggagttctcggtgctgtaggctttcgggacgctgtgtatgcccggcaggggcttccagtgggggccaccccaagtcgcctccagcgggcggaagcggtcgagccggcggagcgggtgcggcgaggagctgtaggtttcctgagccggagacatggcccgccgtgcggcgctcgaggcggcctggaagagcagagacagggctgccgctgcgggtcgtgactccagagttggggcgtctcttctaagctccagtaggtcaggtagtccttgcgggggtatccggacggctccgtcctgtgggagcagggcgggatggtgaggatacagctggatccttggggacgagtttcagacctcgggatctaaggagtctgcacattcaaactcctgcatttccaggcgagcaccccttaggaaggacgcgaccgggcacgcgttgcctgcgttcctgggtcctcgaggtacttaacgtcctggaagctgagctttcgcatcctagggaaggaaacgggggctttcgcttccttgcgaaggagcatgtgggggctcaagtaccgaaggaggccctgccctcagatccagaatcccctcgagccgctgtgcaggcttcctgtccctaccgcggttcctggaggtgacactaaggactcctgggtgctaaaagagggaggggctggggtctgaactgtggttgttgctgctataggagtcgagactgagaccaccggtcagggaatgggagccagcccaggggctcggcgtgcaccggccatggcgggggctgtgcaggaggcggtgccgagcgagagcccggcttacttgggatagaaccgaaagtcccgcgccgaggtggtcagatagagctggcggcggttcaggacgccccggtcggatactgtgaagggtgggccagacagcgcggggttcttcgtgcaggcgattagagcctgagcaagattgggggaggaggcatacccaagacatagatttcataccccatcccaagtcctgggtcccgagttcagaatccctctccttcggcctcgacagccatgacggccacggccctcacaccccgccccagggtcagagcccttcctgccacccacgccagggaacttcagcttcctttctcatacccgaacccttcccagcctcacctccctaaatccaagccctcctgctggtcaaggaactcaaatgcaggcccccagccaccacaaaatccccctggttctgcccccggtctcaagccttcttggtgtggccactggagctgagctgcatcttgggcaacaactccaggttacctctcctaactcccaccctaccacgtctcagaatattctagtctcctccccacccacagcccgccgtctagctccgcagcagcttaggagccctgaaggcgagtttccagcccctggtccttctggcctggcgtggatgcccagcccttcctcccgctcctctaacctcccgatcccgccccagatcctttagccacgccccaaagctgtgatttccttctggccccgccccaggctcccggagctccgctggtctcgccagcgccggcttccacccagacacctgggaaggccccccgcggtggtggtccgagagttgtgaggggctggggcccgacgtatttgggggcgcgcgcgtccgggccgggagagcaagtgtactgcgccctcgtctcgctgctctggtactttgtggtcagtaggagggttcagctgcggtgtctgagctgcggaaaggcaacccagagactcatgtgaaggagcaggggactcaaatgcagtcccccgcagactccggcgctccccaaatcttaccttttctcctgaatccttgatccccacagtccgcgtggggtctgcaggctctggggctctgggctgggcgcagggcccgccatgggtcttgggcacgtaggccgagccagaggttgtctcccatctgctgaggacctcgtcgaaagcccagatgcgagaatcctgctttgcagtcggaggtagagggtccgcgaccgtggactggagagaaggcgccgcacatcagctagaaagactcaggagtccctatcaccccccaccccaaactctgacctcttccagtcggcccccagccctttcctctgcagtccctggcatccaaattccctggcgcctcctctctcagacccaggactccaggaccctcctccttcagagaggagtccaagctcccaatccccttttctcagcccccatctttctgggtccccaggccccgcagggcttcagcctagggtctgcccacctgcaccgtgggcggggggaagggtacgggtgggataatgccatgggtaacgtagctgctggtgagatgccagttgggccaggattcaggcatctcggttgcagagatgaaagaccacggggggccacagcgcacagccagggtgccactggccatggttccaccccctccctgtagccaagcaggagctggtttgttgctgttgccccaggtgacagaacccgcccaccccaatccagccaatgaaaggcctgcaggcacatggatggatggagtgattaagagacccagagacagagagacagggactccaagaggggcacagagaaacacggagtgggggatggagagtcagaaagaggcggacagaaggggatggagaagttcaggatttcagagacccagggggtgggggagacagagacacagaaagaaggacagagacctgggggtgtcagagatacagacagagacccctgcactgcccccagcacctcaggacatccatgagaaacacccccctttgctccagggtccagaacctcctggctgcttcctccctctgccaggcctgcccacctcggggtaacgatttccagatgtccccggggctccccaacccttcccgcacgtgctgaaggagtcagcgctggtgtcagctgtcctgcctgcctttgatttggttgaaaacttccacctgggtaggctgggtggggaaagagaaagggatctagagagaagtgcaccggaccatagcgaaaaagatgggctttgatgagtgaggaataaatacaacaagaaaggggagagacagggaggaagaaagagaccacgatggaaagggagctattagtactacccagaggcgacagacactggaagttagagacagagatgaaggtggcaaaaacgaccaaagtcacagatggaaaacaaggagacgtagaaactgaggcagccacgccccaccctgcccaggggcctggtctgtatagatgcggggagaagttgcctatgtcctttgctcaaagctggacctgagagagagagagagagttggtggggcgatgggtaacatgtgaagggctattgtgaaggcctgtggtctgtccctggcttcccttgtcacttcttcactataaacagcttttgatcaccgggcgcagtggctcatgcccgtaatcccagcactttgggaggccgaggcatgcggatcacttgaggtcaggagtttgagaccagcccggccaacatggcgaaaccctgtctctaccaaaaaatacaaaaagtagccgggcgtggtggcgcacacctgtaatcccaactaaggcagaagaatcacttcaacccgggaggtgaaggctgcagtgagctcagatcacaccactgcactccagcctgggtgacagagcgagactccatctcaaaaaaaaaaaaaaaaaaaaaaaaaaaaaaaaagcttttggtcaaggcctctgactgctcaacccccattatctcatcctaccagcccattctgcagacaaggaaaactgaggctactttctgcagccatgcccaggatcccacttacccctcctcccccattcaggcttctggggcctttctgttggattttgctggccctactcaacagctctcaatggacagtgaccccctgatcctagccagggggccgatgagttagtcagaaactcatgccccactcaagctggacaaaatttttttcttttttttgaaatggagtttcgctctttttgccaaggctggagtgcaatggtacagtcttggcttactgcaacctctgcctcctgagttcaagcaattctcctacctcacccttcagagtagcttggattacaggcatccgccaccacgaccagctaatttctttatataattttagtagagtcgggttttca[131 bp omitted]ctttcccaatgtagagtaaaggttgggacagggaagagggctagaaacctgacttcagctccctgccgagggctgaactctccagcatcctgatcacttctcattcaaccttgcttgtactcctctgtgatcggtagcttattacctcaaaacagaatattctaagtcaacctttgccccctcttaccaagtaagatttcccatttgaaccccatctcccagatacttaaaggccttctgtgggccacgttctcaaggtcccctggccatctgcttgcctgttctagtttctctcctcctccacccacatcgtgaaatgtcccctcccactccccagcaaggtggtgtcctctgagactgagtagtcagcaacttaacaccaagggccaccaatgatcaaatccatgagagttgatctgaggagttatgtattagggataagaaacagtaaacactcagtaaatagtggctattattattatatcatcatcattattaccctcaagttgctccaggagaactcctattcaacctccaaaaccccatgtggtttcacccatcctgcagagattgagctcaaaatcagagaattgtgattttgtgattatttgatgagttcccaaactggggtccttagatcagctgggccatccctgaggtctctcagcatccagctctgttattttcctgggcatgggtctcaggcccggccagtccggctgaggagtgtgcagacgcaggcagtgtcaattcgaatccatcgccagcccacacggccctgggcatcagcggtcaatgcccgcacataggactgcttggccttgcactcagatacccagtgcctcctgtccactccccggcagccccctccacctgcccccgggccaccttcctcagcgttatcagccttgcagcgggtttcaaagaagtactggcggaggggactgccgccagctgcaggcacctcgcccaacacctccacctcgcgcccacgcaagtccacagcggtccggcggtctgtcacccagccactgactgcatcgcacacagccagctcaccccgacgactcgctggtgcagtttcgctcaccccacgccggctgcggttggccggggcacctgctgactcccgaaaggccccagcctccagcaggaagagcagagggggcccagcaggggcacccctagacaggactactcggggggagagaaggtcccactcaggggccagaaaagggggcaatgttgagggtgggggttgggactcaattggcacactggggaggaggaaaaggaggaggatggggagggagcatgaggggagagggagcatctctcggagcacctggagacagaaagagggaggctgggattagagaagggggtaaaaacttcagtggggaaagaagttgggaaccccaggggaggcttgcctgccaggattgtggggaagcccttgttctagaagtttgggggaccctatatctagggcttgcgtaatgcgcaacttgtagattaataataaatattcaactactacaggccaggcactgtgccccacacctctaatcccagcactctgggaggctgaggcaggtggatgacttgaggtcaggagttccagagcagcctggccaacatggtgaaacctcatctctaccaaaaataccaaaattaaccgggcatagtgctgcacgcctgtaatcccagctactcagtaggctgaggcaggagaatcacttgaacccaggaggccgaggttgcagtgagcagagagtgcaccactcccctgccacctgggcgacaagagtgagactctgtctcaaaagtaaaaataaggccaggcatggtggctcacacctgtaatcccggcactttgggaggccgagatgggcggctcacctgaggtgaggagttccagaccagcttggtcaacatggtgaaaccccttctctactaaaaatacagaattacccgggtgtggtggcgcatgtctgtaatcccagttacttgggaggctgaggcagggcaatcacttgaacccaggaggtggaggttgtggtgggctgagattgaaccattgcactccagcctgggcaacaagagcgaaactccgtcttaaaaaacaataataataataaaataaaaataaaaataattcaactactattacttaacagtaacagatgttgaaatacaggctcagagaagttaatgatttgtgcccggtcacacagccagcaaatggcagagatgggacttcacctctgggcaactgcactctgccgtccttcctgtgcaactctgaggaaccgacagtcttgcatcttggaggatgttccaaacaattttttttttttgagacagaatctcactctgttggccaggctggagtacagtggcacaatcctggctcactgcaatgtctgcctcctgggttcaagtgattctcctgcctcagccttctgagtaggtgggattacaagcacctgccactgtgcccagctaatttttgtatttttaatagagatggggtttcaccatgttggccagactggtcttgaactcccaacctcaagcaatagtcgtgtcctggcctcccaaagtgctgggattacaagcataagccaccatgcctggtcccaaacaaaatttttttttttttttttttgagatggaatctccctctgtcgcccaggctggagtgcagtggcacgatcttggctcactgcaagctccgcctcccaagttcatggcattctcctgcctcagcctcctgagtagctgggactacagactcaagccaccacgcctggccacattccacaatttagagaaaggtcacaacctggaatcctagggagaccccagttcacctcaaaactgccactaaggaggtaaaacgctgcccctctgaggcaggcttcagtttccctgtgtgtgaaattgacctggcgctgggagaggctggtggaggcgcggattttgcagtttccctacaacattctggaagcctgtggttctgggaaagggtggcgtggagaagactgggaaacagtcagtagttaccagacctgtcagcacctcctccgcctcggagctctggggctgggagtccccaggcttcggggggcccctgtggaggacacaggtggccccctccttcctgacatctcaggagagggagggggcaaccacctaggggaagaaaagaatagacaggttatagaggcaggtggggaaggggccaaatccctgaacaaccccttcccagagttcctcttcaagtgcagggtacccaagagtcaaggccccgccccctttccagaggccccttttctacccaggtgatggctcctggctgggatgggaagcagatggagggaggggaagggagaataggggaagggagaggcagtggatgaaggaggctggaagagattacatccccctcggcccattcatctcccagatggggcggaactggcctggacacccgggtccctgagggcccacactcaagaagccctggttccccaagctgcttcctggaatgttccctcctcacaggacaggccagggcccgcccaagacttctgcacatacctggagtggctgcctgccctggctcctcggtacaggaaaggggaagggtggagagtgaaaggagcccaggctgacccaaccaggaccgccttctccctcagaccgagtagtgcagaccccagggcctccaccttcagacccaggagttcagatccccagcgccctcctccctcagacccaggagtagtccaggcccccagcgccctcctctctcagacccagaagtccaggcccccagcacccttctccctcagacccaggaggagtccaggcccaggcccccagcacccttctccctcagaccctggagtccaggtccccagcgccctcctccttcagacccaggagtccatgcccccagcgcccttctccctcagacccaggaatccaggcccccagtgccctcctctctcagacccaggagttctggaattcaggcccctccttctcggatactaagaaatgcagactccgggttcctcatcctccagatttgggttgggggttccggactccgagacccctcaggggaaaccggctgcatatctgggacacttccctcttgcctcagtttcctccgccaagccccgccccggtcggccccgcccccgtccctccccacccgagggcagggcgaccaggacgccggaatcccgagggaggaggagtggagatcttacctggggcgccctcttcggctcccgcggctgccctccgcccggcagcagctcctcctcctgctcgctggctgcagggacgctcgctggcccgccgggtgctagctgctcacgctccgcagggcccgggtcgggggcgggggcggggcggcgccgggcggcagaggaggggccgggggatcctgccttgcactcgcgtgccgggaccttggaagccaggcctggctcgttcaacgcggccgccttggtcacaggagtcccagtttccagctgcctcctcctttggacctagcagtccaggcccccagcccctcctcccttcagacccaggagtccaggcatccggcccctcctccctcagacccaggacttgcgaccccagccacctctccccccagccccaggcgcctgagtactaagcccacagttccccccaccacctcccaaccccgccccgtctcagactcaggagtccagcccccagcctcctcctccattagccccaggagtctgggcctgagattcctttgccgtcttttgccaattgcgtgtcaatcccggggcagattcccaccctctgctctcctccccacttcccaggagctccacgccagacattaaccagctgggcttgggcagtgataaggccccaggcccggggagacagtggatgtgggggctcccgcatactcctctcccctggaatttcctggctggggaccggggagaaggtcttgtcctgagctcagataagagacgtgcaaggtatcataggaccagagatagacagatgtgtcttaagaacaatcagctaccttgagaaatggtgcgcggtgacatgaagggagagatagggagaagacatggaaaagtggggagagaccaaaagaaagagggggaccgagactagagagagtgggggagggcaggagcccagagagaagacagaggcccagagagcgtgagggcagacccccccacccccccgagaaggggacagagcccctgagagaccctgagaaagacagggatgggaccggagccggagtgtctcaggacagtcatgagggcagcggggctcctcaccccaccacacctctaccctgagactccgctcccctccgcctgcgctattttcagaaggaaaactgacacctgcctcgagggtcatcccacaccccctcagcctaaatatagcatggcaaggtggcaggagggtgtccccggttagggtgtttcctgctcctcaccatcccagccaaggcaacacacaaggccgctccagttatttattgggggtggggggaagggccacttcccaggctttgggtgtgcattcaggtcacctctccggcttctccacccttcccctgttcctaaacagccaatacatcctgccgcatagcaggaggactctagcttctagcttctagcttctagtcctggaggggatagtagggatgaggtttccaaacagagtgactgggaaacagtctctgtccccctatctccaggtctctgttcccctccctctggatttctgtctccctccaactctgggtctgtccttctctctctgagtctctgtccccctctctctctgggtctctgtccctctctctctgggtctctgtccccctctctctctgggtctctgtccccttctgtctgtgggtctctgtccctctctctctgggtctctgtccccctctctctctgggtctctgtccccttcactctctgggtctctgtctctctctctgtctctggatctctgtcccccctctctctgggtctctgttcccccccaggtctctgtccccccttctctctgggtctctgtccccctctttctaggtcccagttttcttctctctggatatctgtccaccctctctgggtcccagtctccttcttgctgagcctcttgcatcctctctcttggggtcactgtctgcttctctttcccctcgtgggggtctctgttcccgctcccggccatctgccctcttcccccttgcccttggatttctctcttttgctctgtgcctctcctccctcctggcctcagttcctgtctgtgtctcctctttaggtctctgtgctggagtccaacctgtctcttgtcactgtgaggtccgtctccattctgtccctaaatctggctttctctccatttcagagagaagtgactacctaaagcttctattaatttcaaccattatcaaactcctctcaccatctgtaccttctctttagctgtatgaaaaggtgctcagatgaaaccaggggtttccacactgaattcctgagctgcattttgagttgccaagaggaggcgtgttctcctccaaccagttcccttcccatgcttcccactggtgtctctaaggaagatttatttgacccaaaaaaggggtgggtatggctaaaaataacaacaacagtctgtaaaccactggataggttttaataaattaacccaagtaaagtactttgataccaaaggaagccctatatgtgttagtgatttcagccttcttcctctaaatgccctttgagttctgaaagatttctgaaaatgttcggccttgtgaccttgggtaacacctgctgctctgagcctcagtttccccgtctgtaagaaatgaggctacgggactcaggaggacccgtgtgtcccagcaggctgatggggacatgtgaagcagacagacagcctgcctggcccctggggacaagctgtgagaccttgggaagccactcccctgctctgagactcaggtttctcccctggaaaacagagtgaggcccccagcctgtctgacagccttcctgagctgcagggagggtaggtgacaggcctggttcaggattgttctgtgattctatggaatagactgtacatcactcttgggttcaggggcaccaactttttctggctttttcttttcttttctttttttttttgagacagagtgttgctctgctgcccaggctggagtgcagtggcgcaatctcggctcactgcaagctccgcctcccaggttcatgccattctcctgcctc[135 bp omitted]ggcctcccaaagtgctggggttacaggcatgagccaccgcgcccggccttttctgcctttttctattgtggttctctttccctgagactctgttgttctgtctccaactctgggtgtctgacgctgccctctgggtctctgtccctccctcccccactggctctttttgtttgtttgttgagacgggggctccctctgttgcccaggctggagtgcagtggtgcaatcatggctcaatgcagcctctacctctcagggtcaagggatctttctgcctcagcttcctgagtagctgggatcacaggcatgtgccaccacactcagctaatttttgtattttttgtagagatggggtctcaccatgttgcccaggctggtcttgaactcctggcctcaatcaatcccccttcctcggtctcccagagtgctgagattacaggcatgggccacttcgcccggcttctatcccctgctcttggtctctgtctccccactctggatttctgttcctctcttctgcgtctctgccataccccaccctccaggtcattgtctccctctccctgagtctctgtttctctccctttgggtctctgtctctctgggtttccacctcttcctttttctgggtctctttctctatccttttggctctgtccctctatcatgtctggacagagtacagttttctccccctctcccctttcccttgtggctctgacctccatgtctgagcataaaactgtaggggagaatgggagtgaacagcacaatgaagtggatgtggggtaaacaggaggagcatccacctcttcctaatttacccagtcgcctctggatgaacacccaatcccatggatacagaatccagtcccgccccctacagcgagctggggagccagctcggcacacctcccagagccctcgccactgcatgctcccagatacatgatgcttccccactgctatttcctttgggtcctggtgctaccactaaatgcaaaacagcccgatgtggccctatggaactcgttcgcacagtccaactcaacccaacttcctgtaggactcacatagtgacacaactcaatggaactcaattcagcatggccctatgagactcaaacagtggcatgacccaactgaactggccttacaaggctcatatggttgtacaattcaacacaactcaactcgctgtggccacgaaaaatgtccagccacacacctctacacagttaagcccaacagaaccctacaagattcatttggtcatacaaacttaacccaatgtgacctagaaagctcaaattctaccactggactcttcacatttctacatgactcgcaagttcacagaacctaaaataacatgcccctggaagaatcacagagctacacaatttccaccatgtctcaacgaaacttaacaccacacacattcgatctcaacaatgccatgggggaccatctaacttgacccaacatggccctaggggacccaccaaaccacagaatcctacacaatgcagctggaccacactatcccagactcacaacccaaccaaacccaacactgacctaggaaactcacaaaatgatacgaccaaacctatctcaacactaccccaaaaggctccatgagctttgcacaactcagagtaatatgaaccaattgagtcttcattaacacaacacaacccattgccattcgctgctgcttcaggaggtacccacaggagctaccaaaccacacaacccaagacccaacaagactcagtgtttccccactcgttacgacttaacctagctcttcctaaacccaatcccctccccccagccttgccctccaccctgccctccctccctccctctagggaggtgtgaggtcctgcagacctcaactgttcctcacacttcggtgaccaggtgtttccctgggggtgcccagagtggaggtggtagctcaggtacctccccgtccaccagccccccattggccttgccctccagtgggccacaaggctgcatgtccacatggctgaacatcccagcctcttcgccctctgtctcccggtgataaaagtagctgaaattggagacaatgacgggcactggcagggaaatagtcagcacgcccgcaatggcacacagagagcccactatcttgccacccacagtgacgggtgccatgtctccatagccaactgtagtcatggtgactaccgcccaccagaaggactcagggatgctagtgaaatgggagtccacccggtcaacttcggcaaagtagacggcgctggaaaagaggaccacaccgatgaagaggaaaaagatgaggaggcccagctcacgcatggaggcccgaagcgtctggcccaagatttgcaggccctttgagtgccgggacagcttgaagatgcggaagacacgcaccaatcggatgactctcaggatggccagtgacatggcctgctggcccacccctcgctgccgggccagctcggtgcccagtgccacaaagtagggaaggatagccacaaaatcgatgaggttcatcacgttcttgaagaagatagccttgcttggacagaccaggaggcgtaccagcagctcaaaggagaaccaacaaatacacagcgtctccaccacgaagaacgggtcattgaagggcaggcggggtggatttccaggcatttggctggagccattcagcggagcggggaactgcagggaggaaagtgttcagggagggtcaggctggggctaggacacggggacagccttaatcatcatttaaatacccagctcctctttacacattggtcagtagccgctgcgccaaggccctccgtgacctggttatcccagacttcctcccaggatcccagggatcatccctgggccgctgactttctggttgcctgacctggtgggtggctggagacgtggtccctgccccttcatgcgtgggaactcatgtttgagtagggtgcaacctcttctctctcaaagtcccgcctccagtgttgattttctagatggggagcatccctgccctggccccaccaccttgtgcctagcttttccttgccctccacagtcccagcccagagtataatgcggctgggcgcggtggctcacgtctgtaatcccagcactttgggaagccgaggcgggcggatcacgaggtcaggaaatagagaccatcctggccaacacggtgaaaccccatctctactaaaaatacaaaaattagccgggcgtggtggcctgcacctgtaatcccagctacttgggaggctaaggcaggagaatcgcttgaacccgggaggcagaccttgcagtgagccgagatagcgccattgcactccagcctgggcgacagagcaagactctgtctcacaggaaataaaaaaaaaaagaccttctctgcaagccgagccctaggccccctcctctggcccctcaacctggctttctttccatagattcctcctactgtcgcccctcgggctccagcaccctcagctggagttattcagggcctggctttcaccacccagccgcacagactccggagttttcaggctctccttggcccccctcagctgtgatttttaaggttcctgtcctcctaccccttgcatcaagggccctgccctcttcacgccgggtttctcactgacctcaaccccaccttctgatggggcaggtcctccgacccggatcctcaggccccgcctcccgcccaccctgtcttcggctggcccacccctcgcagcccctggccccgccttatgattggccaggtcccctctggaccccgcccatctcctcccaaaccccgcccgtctccacccacgccccgcctctcaccgggccggctgcggctgcagcagcaagccccgtgccgtcgcggtcgtcgcggaagtcaggcagcgtctcgaggcagaagacgacgatggagacgaggatgaccagcacggagactacggcgagcacgcgcgcggcctgagagctctcgggaaactcgaaaagcagccacagctggcgggcgaaggcgcggcggggcagggggcgctcgggcggcaccgggcagccctcgtcctcgcgcaggcgtgccagggccgccgcgcccagcccgtagaaggccacctcttccaggaagacgtcgagcggcacgtgcgccggccgccgcagccgcccaccggactggtagtagtagagcacggcgtcgaagctgggccggtgccggtcgaagaaatactcgcggcgcgcgtcgtcgtagaagcggccgcggcgcgctgggtcccctagcagagtgtccgggaagcggcccagcgtgcgcgcccgcgtctcgaagcgcagcccggccacgttgagcaccagccgctcgcagcagccgcacggcggcgggcaccgcggctccatggcgcgcgcagccccggcgacccgcgaaccgacgtgtggccccgacgcccggccccggtgcggccccgcctcggccgcctcggccgccgccgccgccgccccagcccggtgtccggtgtccggtgtccgcgcgtaaaaatagcccggcagggcggctagggcgcgagggagggggcactgtgaccccggcggggcggagggcgacagggcgaccgcgcgccctctgccgggacgcccgccctgccctgccccgccgccgccgccgcccgcgcctgctctgcgcctttcccgtcccggggtcccctttctctccgtccttctgccgccgggatcctgtcctgcgtctctccaagtttccgtgtgcgtgtgtttcgtcagaatcaggcttcagttgcagtcgcctcttttcttttctctttcttctttctttctgtctttttttttttttttttttttgagacacagtttccctctgtcgcccgggctggagtgcagtggcgcgatctcggctcactgcaacaacctccacctcccgggatcaagcgattctcgtgcctcagcctccctagtagctggaattacaggcgccaccaagcccagctaattttttttcttttttcttttttagttgagaaggggtttcaccatgttggccaggcaggtctggtactcccgacctcaagtgatctgccctccttggcctcccgaattgctggggttacaagcgtgagccacggcgcccggcctggagtcgccctgtttgcacctttgtctctcactctcttgtgtgtctgtgtccggctgtcccctctgggtctctgtctcttttgggatgtatctctgagtatctctatgggtcatttatttctgagattcgtcgttctgggggcctctgtatgggtccctctgccagcctctacgtctcggtctccgcctttattttgactcttggtctgtctccgtttatctcttgtctctcttggtctctttgtctctcctctctaggtctctttttgctcattatctcttagccctccatgtctctgtctcagggttcctcggccgctcccctttgggtctccccttggggtctctagaggacttagggtctccggagtcatatctcttgatctctccctgaccatcactccatgtgggtgctgccacagtcccggtggctgtcccatcctagggtcactctggcagctgcaaaccactgagcatgtgcacacacgccccattctctccccagagttcgctccagagtctccacctggattcttcgcaagactttctgagacctagcaggacctgagctgcggctatgactctggcaaaaggagtctggtcttgccggaacgggcgggggttgggggtgtgggccggggagatgccacagggtcattttcaggaactgaagggcgcagagacaagacggtggccttctagccactggtgtccggtgacactgcataaaaatagctccatcagatgggcttgggggaagtggaggggtttgatcactgagactcccaggaaagaagtcctggtcgccctctgctgggggtgtggagagaggtaggtactaagggttcgaacgccctgctaatcctggcactctttctcttcctgtcttccttccttccattccttctctcttcttttcttctttctttctttctttttttttttttcttgagaggagtttccctcttgttgtccaggctagagtgtggggacgtgatctcagctcactgcaacctccgcctgccagtttcaagcgattctcctgcctcagtctcctgagtagctgggactccaggcacccgtcaccacacccacctaatttttgtatttttagtagagacagggtttcaccatgttggccaggctggtctcgaactcctgacctcgtgaccgcctgccttggcctcccaaagttctgggattacagacgtgagccactgcacccggccttttctttctttttctttttcttgagacggagtcttgcagtcgcccaggctagagtgcagtgttgcgatcttggctcactgcaacctccgcctcctgaattcaagcaattctcctgccttagcctctggagtagctgggattacaggcgcccaccacacgcggctaattgtttgtgggcggcaagccacccaggtgccgaggcaagagaccgagggcacgagctgttccagtataataaaatatataaaataagaatagttatagtagatatagatcatagatatgattatatatgaatatcattaatcattagtttgtagcaattactctttattccaatattataataatcctcgctctacaatcataacctaggaaaaaccaggccatacagagataggagctgaggggacatagcgagaagtgaccagaagacaagagtgcgagccttctgttatgcctggacagggccaccagagggctccttggtctagcggtaacaccagcgtctgggaacacgcccgttgccaagtggaccatggtctagtggtagcctcagtgccaaggaaaaccacccgctacttagcagaccaggaaagggagtctctctttccctgggggagtttagagaagactctacccctccacctcttgtggagggcctgacatcagtcaggctcacccgcagttacccagaggcctaaccatctccctgtgatgctgtgcttcagctcctagtccgctttcatgttccatcctgtacacctggctctgccttctagatagcagtagcaaattagtgaaagtactaaaagtctctgatatgcagaaataatggcgtaagctgtctctctttctcctctctctctgcctcggctgccaggcagggaagggctccctgtccagtggatacgtgacccaggggaccttacctatccttggagatgtctcacactcctcaccctgcctctttgtcttatatccaataaatatcagcacagccaggcattcggggccactaccggtctctgtgtcttggtggtggtggttccccgggcccagctgtcttttcttttatctctttgtcttgtgtctttatttccacaatctctcgtctctgcaaacggagaaaaacccaccgaccctgtggggctggaccctacaattgttgtatttttagtagagacaaggt[136 bp omitted]ctttctttctttattttttgagacagggtctcagtctgttgcccaggctggagtctagtggcacaatcttggctcactgcagcctcgactttctgggctcaaacgatcctcccacttcttttttttttttttttttttgagacggagtttcgctcttgtcacccaggctggagtgcaatggtgcaatctcggtttaccacagcctccgcctcccaggttcaagtgattctcctgcctcagcctctcaagtagctgggattgcaggcatgtgtcaccatgcccagctaattttgtatttttagtagagactaaaatacatgttctccatgttgatcagtctggtctcgaactcctgacctcaggtgatacgcccaccttggcctcccaaagtgctgagattacaggcatgagccaccccacctggcccctcccacctcttctaagtaactgggactataggcgtgagccaccatgcatggctattttttgtaatttttgtagagacagggtcttgctatgttgcccacgctgctcttctactcctgagcccaagcaatccaccgtactaggcctctccaagtgctaggattacaggtgtaagccactgcacccaccctgtctgggattctatgtcccctggacttctatgtccctctctctaggtctctatcttccctctgtctgggtctgtgtccatttatttcacggtctttggccttctctatctctctctgtccaccatctttctggtctctgtctcctattttctcccattctcgtttttttttttttttttttttttttttttgagtcacagtctcgctcttgttgcccaggctggagtgcagtggcacgatctcagctcactgcaagctccacctcccaggttcatgccattctcctgccac[222 bp omitted]gctctgtcgcccaggctggagtgcagtggtgtgatctcggctcactgcaacctccacctcctgggttcaagtgattctcctgcctcagcctcctgagtagctgggattacaggtgtgcgcaaccacaccaggctaatttttgtatttttagtagagatggggtttcaccatgttggccaggctggtctcgaacttctgacctcatgatccgcccacctcggcctcccaaagtgctgggatcacaagcgtgagccaccacacccaacctaatttttgtatttttagtagagatgaggtttcaccatgttggctaggctggtctcgaactcctgaccttaagtgatccacttgacttggcctcccaaagtgctgagattataggcgtgcaccaccgcacccagccaaggtgccatttttttgctcaggaagttagaacaaaacttaaaaggtgggtcaggcacagtggctcactcctataatcccatcactttgggaggccgaggtggctggattgcctgaggtcaggagttcaagacaaacctagtaaacatggtgaaaccccatttctactaaaaatacaaaaataagctgggccgggtggctcgcgcctgtaatcccagctactctggaggctgaggtaggagaatcacttgaacctgggaggtggaggttgcagtgacctgagatggcaccactgcactccagcctgggcaacagagtgagactctgtctcaaaaacaaaacaaaacaaaaagccaggtgtggtcatgcacatcagtaatccagctacttgggaggctgaggtggaagggtcatttgagccaaggaagtcaaagctgcagtgagctatgatcacaccactgcactccagcctgggtgacaaagcaagaccctgtctcaaaaaaataaaagataaaaaattaaggctgatgagttagggatattatcttggatcatttgggtaggcccactaatcataagggtctttaaaagagggacgtggctgggtgcagtggctcactcctgtaatcccagcactttgggagcctgaggcaggtggatcacctgaggccaggagttcaagaccagaccggccaacatggcaaaaccccatccctactaaaaataacaaaaattagctggacatggtggtgggcgcctgtaatcccagcgactggggaggctgaggcaggagaatcacttgaacccagaaggtggaggctgcagtgcactgagattgagccaccgcactccagcctgggcaacagagtgagactctgtctcacaaataaaaaatcaaaaaaaaagagggatgcaggaaggtctgattcatggaagatgtgaggatggacatagaggtcagagaagagaggatgccatggtgctggctttgaagtttgaagacggaggaacggccatgagccaaggaatgggggcggcttcccgaagcttgaaaaggcaaggaaacagactctcccctagagcctccagaggaaacagagccctgttttcgacgtctaacctctagaattgcattctaataaacttgtgttgttttaagccactaagttcgtggtaagttgttgtagcggcaacaagaaaataatacagtcagactctccaattcctcagagtcattctctgaggttatggta[138 bp omitted]gcctc[225 bp omitted]aggctggagtgcagtggtgcgatctcggttcactgcaacctccgcctcctgggttcaagcaagtcttctgcttcagcctcctgagtagttgagattacaggtgtgcgccaccatgcccggctaattttctttaaaatttttggtagagataaggtctcactatgttgtccaggccgatcttaaattcctgggctcaaacaatcctctggcctcagcctcccaaagcgctaggattacatgtgtgagccactggccctgctctgccttttttttttttttttttttttttttttgagatggagtctcactctgtcacccagtctggagtgcagtggcccaatcttggctcactgcaacttccacctccacagacgcgtgccaccacgcccggctaaaattttttttgtattttaagtagagatggggtttcactgtgttatccaggctggtctcaatttcctgaccttgtgatccacctggcttggcctcccaaagttctgggattacaggcatgagccaccgtgcccgggctaatttttggtctcaatatgttggccaggctggtctcgaactcctgacctgaggtaatcctcccacatcagccttccaaagcgctgggattacaagtgcgagctattgtgttgggcctgttttgtttcattttcactttgaactatttgtagccttacagaagagttgcaaagattgtacagacatttaaaaaatatccatcacccaggttccccaaatgttagaatgttgcattgctttggcaacgtttgttaaagctcagacattggccggagcagtgcctcgcgcctgtagtcctagcactttgggaggctagaggggacggatcacctgaggtcaggagtttgagaccagcctggccaacatggtgaaaccccgactctactaaaagtacaaaaattagctgggcgtggtggcgggtgcctgtagtcccagctactcgggaggctgaggcaggagaatggcttgaacccgggaggtggaagttgcagtgagccaagatcgcaccactgcactccagcctgggtgagagagccagactctgtctcaaaaccaagacattgaggtggcacaatacttttgacaaaatgaaagagttcattcaggttttctatatttccactaatgtctttttcccacgccaggctgcagtcggggttactatgttgcatttggttgtcatacctccttagtcttctgcaatctgtgatagtttgttactttttccttgtctttcatgatctggaaactagaagaatactagtcagttgttttgtagactgtctctcaatttgtgttcctctgatctgttatcttgcttggattgaggttatactttttgttgggtgggggtagagagaatgccacagagaggcattgctcttctcattatatcatactggggggtgtatgatgtccatatgccatatcactggtgatgttaacattttttttcttgagacaaggtctcactctgttgcccaggctggagtgcagtgttgtaatcatagttcactgcagccttgacctcccaggctcaaacagatcctcccacttcagcctctcaagtagctgggactacagacctgagccaccacacccgaataatttaaatctatctttctttctctttcttttcttctatttctttttgttgttgttgttgtttttgacgtagtttggctcttgttgcccaggctggagtacaatggcgcgatcttggcgattctcctgcctcagcctcctgagcagctgggattacaggtgtgtgccaccacacctggctgatttttgtatttttagtagagatagggtttcactgtgttggccaggctggtcttgaactcctgatctcaggtgatccacccacctcggccttccaaagtgctgggattacaggcg[146 bp omitted]agtgaagccccgtctctactaaaaatacaaaaaattagccgagtgtggtggcaggcgcctgtagtcccagctacccaggaggctgtggcaggagaatgacatgaacctgggaggcggagcttgcagtgaatcgagattgcgccactgcactccagcctgggtggcagagcaagactctgtcttaaataaataaataaataaagagaggcagccaggctctgtggcacatgcctgtagtcccagctacttggaggctgaggcagaaggattgtttgagcccaggaagttctgggctgtagtgtgttatgctgattaggtgtccatactaagtttggcttcaatatggtaacctcccatgcgtgggagactaccaggttgcctagcaggggttgaactgacctaggctggaaatggatcaggtcaaaactcccatgttgatcaggagtgggatcatgcctatgaatagccactgcacatgagcctgagtgacacagtgagaccctgtctctgaaaaatcaatcaataaataggaagcacagcataaaagtttagaaaagtcacaacctggcaatgtggtagagaagggaagagcattttttaggagagaaatagaagcaggctgtattgccttgctggagaggttgcgtgactaaaaggaagccaagtgctaacatccaagacaatgggaaaaaggccttgaaggcatttcaggagtcttcaaaacagcctcccccatcacaggctctgaggcatataaggaaagagtggtttactgggccagatccagggccctgtctcctgctcagcctggggacactgctcccctgcatccctgctgttcgatcaccagccatgacacacagggtcccaagtacagcttgggccaccactccagagggtgcaagccataaactttggcagctttcatgtgggattaagcctgcaggtgcacagaatgcaagagtgaaggaagcttagcagctcccacctggatttcagaggatgtgtaggaaagcctgggtgtccaggcagaagtcggctgcatggttggagtccctacagagagcctctactaggacagtgccaagggggaaaggtggggttggaggcctaacatagagtccccaccagggcgctgcctagtggagctgtgagaaggggacccctcctctctagatcccagagtgacaggtctgccagcagattgcaccctgagcctacaacagctgcaggcactaaactccaacctgtgtgaggagacattggggctggactttgctgcccaagactttgggagcccactccttgcaccagtgtgccttggatgcagaacatggaatcagggattattttggagctttaaagtttttttttgtttttgtttttgttttgagacagagtctttctctgttgctcaggctggagtgtagtggtgcaatcttggctcacgacaaccttcgcctcccgagttcaagcaattcttctgtctcagcctcctgagtagctgggattacaggcacctgccaccacacctggctaatttttgtatttttagtagagatgaggtttcaccatcttggccaggctggtcttgaactcctgacctcgtgatccatccacctcggcctcccaaagtgctgagatgacaggtgtgagccactgtgccaggctagagctttaaagtttaatgtcttctctgctgtgtttcagacttctgttaagcctattgtccctttcctttggcagatttctcccttttattttattattattattattttatttttattgttgttgttttgagacaaagtctcgctctgttgccacgctggagtatagtggcacgatcctggctcaccgcaacctctgcttcctgggttcaagcaattctcctgcctcagcctcccaagtagctgggacaacaggcacgtgccaccatacccagctaatttttgtatttttagtagagacagggtttcaccatgttggccaggatggtctcgatctcttgacctcatgatctgcctgcctcagcctcccaaagtgccaggattacaggtgtgagccaccgtgcccagccatcattattattttttgagatagagtcttgctctgtccaggctggagtgcagttgcacagtctcagctcactgcaacctccacctcccagattcaagcgattctcctgccttagccttcaaagtagctgggattacaggtgcatgccaccatgtccagctaatttttgtatttttagtagagaaggggtttcgccatgttgcccaggctggtcttgaactcctgatctcagggatcctcctaccttggcctcccaaagtgctgggattacaggtgtgagccaccacacccggcctattttatttgtttttttgagacagattctcactctgttgcccaggctggagtgcagtcgtgcaatctctgcctcccgggttcaagcaattctcctgcctcagcttcccaggtagctggaattacaggtgcgtgccaccactcccagctaatttttgtatttttagtagagatgggatttca[131 bp omitted]gagacggagtctcgctctgtcgcccaggctggagtctagtggcacaatcttggctcactgcagcctcaactttctcggctcaaacgatcctcccacttcttttttttatttgagacggagttttgctcttgtctcccaggctggagtgcaatggtgccatcttggctcaccacaacctctgcctcccaggttcaagtgattctcctgcctcagcctctcaagtagctgggattataggcatgtgccaccatgcccagctaattttgtatttttagtagagacggggtttctccat[134 bp omitted]aataatttctgtagttattaaacaggctattgaatccatccacaaaacttaagatacaatacttaagaacagggctctaaataacaagtgccagctctctgatctcatggccaacaacctgagattcctgccatctggtctcagttcaggacctttgcacttactgttaaacaccgcccccccggccccaccccagatctcgcttctatctgtcctttattcaaatgttacctcttcagaggggccttccattatcaccctttctaaaacagcctcgctctcacttcccatccctttattctgctccatcgttcttcattatgctggccactatctcaaattatcttttattatttatttatttatttacttttgagacggagtcgctctgtcgcccaggctggagtgcaatggcacgacctcggctcactgcaacctccgcctcccgagttcaagcgattctcccgcctcagcctccagagtaaccgggcttacaggcgcgcacggccacgcccggctaatttttgtatttttagtagagacgggctttcaccatgttggtcaggttggtctcacactcctgacctcaggtgatctgcccgcctcagcctcccaaaagttctgggattacaggcgtgatccaccgcgcctggcctcaaattatctttattcagttaaatgcttttattgtctctcccagtacaatgtaagccctagcagcagaagactttgctttaatcacgtgctgtacccccaaagcccagacagtgcctagcacacacgagatgctcgatgaatagttattgattgaatagattagacatcaacgcaatcaggctgttcacctagggactctttgctaggcggcggagaggtacgttacagttctctacgcaaaacgcatgcgcgaaagatccgggaagtgtgatcggaaaggggcggagcatcagggagagtctcgcggacataggcggttcggcgcggaaagcgggaggtggaggggcggcttggggcaagcgcgcgcgcgcagtgcagaagccagccccccgcggctgaggtactcaaggtgcccaaaggcggggtagtgacctcgcgcgtgcgctgtgcccgcggcagcgccgggtcctagtgtgtgggttgttgttggcaccgcacggcgcgtgcgcagtgaggacggcggagggatttgcggccgggacccaccccctgctccagtcgctatcggaggccgcgcgggtggctgagcagcggcctggtgcgctcgcttagcgggcgacggaatcagacggacgtggacgcccccggagtggaagccgaagcaggagttgttgttgctgaggggctgccgcagccgccgcgagcctccggacagacgccagagcgaggagggcgctacgcggtgagtgagtgtgactgagtggcccgacggggtgcggggccgctacccagaagccccagcggtgggcccggtcctcttccccgcggccaggcccctttcccgcgtccccgccacaggtcccttctgcatccctttcccggaccccgaaatctctgggcacccacgcccgcttcccacagcgccctcgtggttccctacccacaggcccttgcggtgtgtggccttttttctttttcgtttgtctatgttgtcctggacccttacccataattcctttcgctttttgcggggtccaggtctgttacccacaagcacttggttttggggcttcgctccttatgtttctctttctttgcttggaaacttccgatccccaggaccctgcaaactgcatctcgtaatttgccctccacggcacgggacgagcagccacagctgctctgggcctccctcctcgggtccttgatttccccagaaattcccagggaacctctccgccccacagctcgtgtcagaggactctgagacttcactcttcaggaacccttttccagccgttatttttgttttctttaccggcctttcacctccacccccaccaagacgtacccttttctccgcaacacaggactgttctctgcccttacagagcctgttttaattccgagacttttctcctgtctttcttattttgagagtcaaggagtaacaggggctttctctgtgcagacccgatctaacctaaggctgtcctgcttctgctctcagacttggcaagatgacccagttcctgccgcccaaccttctggccctctttgccccccgtgaccctattccatacctgccacccctggagaaactgccacatgaaaaacaccacaatcaaccttattgtggcattgcgccgtacattcgagagtttgaggtgagttcactgagcaggccaggaatggtttgggttctggggagcaacgggttggatttgcgagtccagcttctggccattttgccagctgcgtgatttaagcgaggggcttaacctttgtgatcctcagtttctctgttttaaatggggttggagccgggtgtcgggtgtggtcgagtgcgtctgtagtctcagctactcaggaggctgaggtgggaggattgcttgagcccaggagtcggaggctggagtgctttgtgattgtgccactatactccggcctgggtgacagagcaggacttcgtctctcaaaaaaaaaattttttttttaagtggggttgtggcccggtacggtggctcacgcctgtaatcccagtactttgggagaccgaggcaggcggatcacttgaggtgaggagttgaagaccagcctggccaacatggtgaaaccacgtctctgctaaaaataacaaaaattagccggacatggtgcctgtaattccagctacttgggaggctgaggcacgggaatcacttgaacccaggaggcggaggttgcaatgagccgagatcgcgccactgcactccatcctgagcaacagaacaagactgtctcaaaaaaaaaaaaaaaaaaaaagtggggttgatagtacaccttttgtagaatttttgtgaaaattcagtgagtagtggttgaggattcatgcctaacccacaccatttatcagctctgactttgggcaaatgttgtatcctcttaatgcattggtttctttatctttagcaaggggatagtggtagcacccttataatgttggtggagaattaaatggcaaactgtatgtcagggggcttggcaccaagcagtcagcacatgtcagcctttgttactctgtttactacttttattgttaataagatgatgttcataaaggcttagcacccagtattgagtattggagggcttaaaactgcagatggggatcttagctctgcacctttgggataaataggaatgaatgacttaggctcctggacctctgtgtttttatttgtgaaatgggatgacaagggtcatctcttaggtgcatcagagcacacctgagaaaagctggcacacagtcggaagttacaagaagaacgttctagcattgggtaggtaagggcagctggaggcgagggagttgcagagcagaatttcgtagataacagaaaggtatgtcttcagtgggatttgccacccttggtgaacccgcacttgagagatattactggccaattaacttaatgggcacaggcgggtggtaggtgccctttgatgatgcaggtcatgtgccagttaccatttatttatttatgagacagttttgctctgttgcccaggctggagtgcagtggcgtgattttagccaactgcagcctccggttcaagcagttctcctgcctcagcctctcaagtagctgggattacaggcatgcaccaccacgcctggctaattttgtatttttagtagagatggggtttcaccatgtaggccaggctggtttcgaacccctaacctcaggtgatccaccccccttggcctcccagagtgctgggattacaggtgtgagccaccatgcctgggagccaggtactttttttttttttttttttttgacttggagtctcgctctgttgcctaggctggagtgcagtggcgtgatctcggctcactgcaagc[135 bp omitted]gatctcctgaccttgtgatctgcccactttggccttccaaagtgctgggattacagacgtgagccaccgcacccgaccttttttttttttttttgagatggagtatcgctctgttgcccaggctggagtgcagtggcgtgatctaggctcactgcaacttccacctcccgggttcaaaggattctcctgcctcagcctcctgagtagctgggattacaggcacgcgctaccatgcctggctaatttttgtattttttgtaaagacggggtttcaccatgttggtcaggatggtctcaaactcctgaccttgtgatctgtctgccttggcctcccaaagtgctgggattacaggcatgagccactgcaccctaccagccagttcctatttaatgtgtggttgatgagacctttaagagctgccttggccctcagagggtgtgcagttgtgggctttggagccctgttctgtcagcttatgttgctttaggcctggtcatcctcactggcactcataagcagggccctgccatcactccactcccatcacatcctctggcactttgttcaatgtgagtgatacttggagctgtgagaagcaatgtctttcctaaatatggaagacagggtgtttcctaaatactataaagctagatgtcacctgtaccagtgcttttcaaactgtctttggtgaaggacagatactgtttccaatctgtttgcttttgataaatatgatagaattactttttaaagaaagatctacagtcaggagttcaagaccagccaggccaacatggtgaaaccctgtctctactaaaaatgcaaaaactagccaacatgctgtcgtgtgcctgtaatcccaggtactcactcaggaggcttaggcaggagaaccgcttgaacgattctagtcagttgctgggttccttttagagagacgggcacaggggggaaagcagggcttagaatcgcttgaacctgggaagcggaggttgcagtgagcccagatcgcgccattgcacaccagcctgggcaacagaccacaacttcgtctcagaaaaaaaaaagacctacagaataaaagaccaaatttgtattaagagtcagtggacatcaaattgtgaaattactgtagaagttcctgaacacttagtcctggtttctgtacttatcacagtccagcaacagtttagatagtactggtccatggaccatgcttagtttttgagacaggattttttttttttttttttttttttgagacggaatcttgctctgttgtgcaggctggagtgcagtggtgcgatctcggctcactgcaacctccgcctcctgggttcatgccattctcctgcctcagcctcccgagtagctgggactacaggcgcccaccaccacgcccggctaattttttgtatttttagtagaggtggggttt[136 bp omitted]gatggtgtttcactgtgttgtcccaggctggtctgaaacccctaggctcaagcattctccctgtgtcatcatcccaaagtgctgcgattacaagtggaagccactgtgcgtggctgcagaccttgctttgatctgtgccactcccctccctccactgtgtcaggggaagtgtgcgtggatgtttatttttgtagggggtgggggtgggagggttaacctgtttatttccttggtgagtgtcccttgccatttcccccagtccttcccaccctgtcacctctcttcttgttcccaggaccctcgagatgcccctcctccaactcgtgctgaaacccgagaggagcgcatggagaggaaagtatgtcatttttgcttcctgaccccctgttttaccactgtctccagatgatccttgacactagggcacttctatctgcattcacttctccacctcccctttctcctgacagagacgggaaaagattgagcggcgacagcaagaagtggagacagagcttaaaatgtgtaagtctctcatccaccatttggctctctcctctcccaaaccctctgtattcttcccaggtcatacccaggaccctgctgtctccctaaggcctgtgttgtggggaacagggttgttagttcatttgtttagcccctgccacttcacaagcactgtttttggtttaggcttttcagcagcagaacatagggtaaaagttggcaggaagggagacccctggtaccttgggctcctcctgcatgggaggacagttaaggggctcccacaacccagctgggtgtcacaggctgaagtggtgggttgtgggatagtggtctgtcctggctctaaccttaggtccccaacccttgggctgaggatgttccatcccctccacatagaggaggaattggagtacaagacaggtgtgttgttgccattaaccaaactcataagagggtcagatgtcaacctccagtggctctttattctgaaagtgaaaactgtacagtcacaggcagcatagcagtgtttcactcagcaggggaccgtggatgtgatggtgatcctataagattatatcatattttgccaggcactgtggctcacgctgtaatcccagtactttgggaggccgaggcaggcggatcatgaggtcaggagttcgagaccagcctggccagcgtggtgaaatcctgtctctactaaaagtacaaaaattagctgggcgtggtggcgagcgtctgtaatcccagctactcgggagactgaggcaggagaatctcctgaacccagaaggcggaggttgcagtgagccgggatcgcgtcggctcactgcaacccagcctgggcaacaagcaaaaatctgtcttaaaaaaaaaaaagattataccgtctatttactgtaccctttctatgctttgataacgtttagatgcacaaatacttactattgtgttaggattgctgtagtatttggtgtagtaacacgcttggcctcggagcagtgggacgcaccctctagcccaggagtgttaggtatgctgtctaggctcgtggaagtgccatctcatgttggcatatcgacatcatcatcaaacgacgcacttctcagaacatgactctagtgagaagacaggttttcctcctatacctgtgaactttgatgaatccctttcctccaaatcctggagtgcaggatttcctcacggtgcttacgcagaagcgtgacagagacatctggcggtgcactctttggacattggctgtcggaacgctgtcttgatgtcctgcctcagaggcatctcagactcagtgtccaaaccacaggggttttccctcgccaccaacctggtttcctttgggtgttttctctgggacatagacattcagctgtgccggtcatgacctcattttttgccatgcagtttgtttctaacaccttttctaaccttttgctcagcctctcaccaagacctatttgtgttattttctaaatgtcacaaatctgacccttcttttcatgtccatcatcaccacccaggtcacctcttgcctagacaacacagtcacagtcttaactagtttacctatgtctttttgtttgtttgtttgtttgtttgttttttggaggcagcctcgctctgtcgccaggctggagtgcagtggtgcaatcttggctcactgcaccctccgcctcccaggttcaagtgattctcctgcttcagcctcccaagtagctgggactacaggcgtgcgtcaccacgcccagctaatttttgtatttttagtagaggcggggtttcagcatgttgaccaggatcgtctagatctcttgaccttgtgatctgcccaccttggcctcccaaagtgctgggattataggcatgagccaccgtgcctggtcacccccctccttttttttttgagacggagtcacgctctctcaatcaggctggagtgcagtggtactatcttagctcactgcaacttccgcctcctgggttcaagtgattctcctgcctcagccttctgagcagctgggactacaggcgtgcgccaccatgcccaggtaatttttgtaattttagtagagatggggtttcaccatgttggccaggctggcctcgaactcctgacctcaggtgatccacctgcttcagcctcccaaagtgctgggattacaggcatgagccaccgcagccggcctagtttgtctatatcttaaccaaccacatccactgtgggtcttcttttttttcttttttggaaaaactttaaaactgagacggggtctcactatgttgcccaggctggtcttgaattcctgggctcaagtgatcctcttgcctcagcctccctcagtgctggattacaggtgtcagccattgtgctcagcctcttttttttttgttgtgttttgttttgttcttagggacagggtcgtgctgtgttgcccaggctttactgccgtggtgcagtcatagctcactgcaaccttgaattcctggcctcaggtgatctgtctgcctcggcccccagagtgttgggatttcaggtgtgagccaccatgcccagccaaaagtgtttttcattttttgttttttgttttttagatggagttttgctgttattgcccaggctggagtgtagtggtacgatctagggtcactgcaacctctgcctccccggttcaagcgatttccctgcctcctgagtagctgggattacaggcatgcaccaccatgcctggctaattttgtatttttagagacagggtttctccatgttggtcaggctgttctcgaactcccgacctcaggtgatctgcccgcctcggtctcccaaagtgctgggattacagggcgtagccaccacacccggccagaaatgctttttaaaaacggttccacccgggcgtggtggctcacgcctgtaatccttcaaggcaggtgggtcacctgaggttgggagttcgagaccagcctggccaacatggtgaaaccctgtttctgctaagaatacaaaaattagcccggcgtggtgatgtgtacctgtaatcccagctactcgggaggctgaggcaagagaatcctttgaacctgggaggcggaggttgcagtgagccgagatcacgccattgcactccagcctgggtgacagaacaagattccatctcaaaaaaaaaaaaaacaaaaaaaaaaacagttccaggccaggcacggaggctcatgcctgttgtccagcactttgggaggctgaggcaggcagatcacatgaggtcaggagttcaagaccagcctggccaacatggtgaaaccccatctctactaaaaataccaaaacaaaaacaaaaacaaaaacaaaacaaaacctagccaggcattgtagtgggctcctgtaatcccagctactcgggaggctgaggctggagaattgcttgaacccgggaggcggagtttgcagtgagcagagatagcgccattacactccagcccgggcaataagagcaagactccttctcaaaaaacaaacaagtaagttccaattgggcgaacaaaaaagttccaattgaggaatttgaacactggatcatagatgaggttaaggaattagtaaatgttaactctaagatgtaatagtggcactgtggttatgatgtttaaaagcctttgttagagaccaaaatggtgtgctatctggaatttcatttaaaataatccagccggtcgtggtggttcacgcctgtaatcccagcactctgggaggctgaggtgggaggattacttgagtgatccaggttcgagtggtgaatatggtgaaaccctgtctcaactgaaaatataaaaattatctgggtgtggtagcaggggcctctaattgcaactacttgggaggctgaggcaggagaatcacttgaactcaggaggcagaggttggggtgagctgaggtcatgccactgcactccagccggggtgacagagcaagactccgtctcaaaaaaatgcagtgggctgtgggaggatagggatgaaacaagtccgtccacgtgttgataatggaagcgggctcatgggagttcgttatactgctctgcctccattaaatgcttgaacttctccataatagaaaagaaataaaagaatggatcaagttcagtagggtttctgtgcccttgagagcctccactcatagctatagaagcttgctgtgccttgtcacaatgaacagctcccgtcaaggggacggtgcctccttgctgagcgcttgtacttggtgttactgactttctcacagcttccaagtgcagcaggggttgctactcccatttttaagataaagaaatggaggcttgttgaggcaagcacgcttccaaagagtgagagttccaagatgggacctcgagtacctcaaagcctaattcccaactccacgacccacttccgttgagtctctgctctgggctgctacttagatgagccctcaaccagtgatgtcctgagggagagctgccgtcagggcgctgcacgcatacgctggctgtggggcgctgcccggcattgggtctgtgctaccttctttgagcttttgttctctatcttcaggacttgggggtaccattgctttgctgcatttgctttttacctttagtcacatttgtggcccccccaccccgggtaagcaagtgctccagggaactcacacagtgtgctggggtggtttccctctggctgcccttcaggaagctcagctgttgtttggccttcgtccactccccagccctgcagcattcattggtcccactgtcatgctccacagtaactgttagaatgcctgctgtctggcgttgccgggtgtgtttccttgctgctgtgacagctttcagctcttcattaaatgttagcatcttgtgaggctttttctaacctgccttgtaaagtcacccgtttctattctctgtcgtcatctgatgtgatcataggatctccttatttacctctttcattagcatatgaaccccatgagggtagacacctttttttttttttttttggagacagtctcactctgttgcacaggatagactgtagtggcacgatctcggtttactgcaaccttcatcgcctccctggttcaagcgattctcttgtcttagtctcctgagtagctggaccacacccagctaattttttgtgtatttttagtagggatgaggtttcgctgtgttgatcaggctggtcttcttgaactcttggtcacaagtgatccgcctgccttggcctcccaaagtgctggcattacagctgtgagccactgcgcccagcacctttttttgtcttgtttactgcgaaatccccaacaactatagcatttccaggcacatagtagatgcttaagaattacttacttacaagagcacaaacatcggcgaataaaaagaattacctattgaatgaatgagagttagctggtgcaaaaaaaaaaaaaaaaaaagccagtgcagattgagagacctggccatagaaaattacaacgctcagggataaggtatggcaaggaacgttttttgttttttgttttttttttcgctttattgccgaggctggagttcagtggtatgatctcggctcactgcaatctccacctcccagattcaagcaattctcctgcgtcagcctcccgagtagctgggactataggcgcacaccaccatgccctggtaattttgtatttttagtagagacggggtttcgccatgtttgccaggctggtctcaaacacctgacctcaggtgatccgtccgccttagcctcccaaattgctgggattacaggtgtgagccactgtgcccagcctggcaaggaacttgaggagtgggtggagagaacgctgagatggagttgttttcagacgtttccatttgtcccagatagcgattcccttaaattgtggcttaggcttctgttttctaaaatattcttaggccaggtgcggtggctcacgcctgtaatgccagcactttgggaggccgag[131 bp omitted]ctgaggcaggagaatcgcttgaacccgggaggcggaggttgcagtaagccgagatctcgccatccattgcactgaccttgggcaacaagagtgacactccatctcaaaaaaagtacattccttaaagtcatcttgaccttagtttatacttg[132 bp omitted]cgaaaccccatctctactaacaatacaaaaattagctggatgtggtggtgcacgcctgtaatcccagctgcttgagaagctgaggcaggagaattgcttgaacctcggaggcagaggttgcagtgagacgagattgcgccattgcactttaagcctgggcaacagagcaagactctgtttaaaaaaaaaaaaaatctgagactttatttctctagcttctggcaacacccacactgtcttcctgaaaaggtagcacccgagggttcggggaaggagcctggtagttcaagtgcccggggtgagaggtgaagtctgccttggcccttcgccactttaacacctccctttttctgtgtctcgagtttgttctgttttacttccatttgcaaaatagtaataaataaatatcagtgtccagcactgtgtctgggccatagtacgtgttcagtaaattatatgtctaatgttccattattggaacgctaagcatgtgggagttatttatatcctactgctcgggtcatcaccagggtctgatttttcacacgtgtctgcaattcaaaaaattgcaacctctggcataaatgggttaatgttattccttttctcatgctctcccagaatgtgacagggcttccgagggaaacactataccatggaagaaccggcagagtgtccttaaggccccggcaggagtcagggtcattatgtgctggagccaccatatttggtgaaaaggacttattcccaggcctgacccagcaggatcacctatgaaattggtttcttaggagattcctggctcttttctttggagattgttattccttagtagccaggtagaacagtttgcctcacagtagtgaggctggagtgagaatctgatctgacgctagtcagttcctgggttcctttttagagacacagggcacagacaggaaagcagagcttacttagtgtttgctttcctggctctcattcttagccttggggcagcttggtctcaggttttcctgtgggctgtagttgcagtctgtgtccagtaggtggcagtgtggccctgcctacaggagggagctcagaacctgggggcatcagctgcatctccagggaggcccagttgggctattactgtttggatcaccttgcatctgggagcgatagggcccttagggtttatgtaggtctgaaatggcagttgggcctgcccacatcctgtcagcttgaagtcagccttacctcctctcctcagcagcctggattatctctcagccactctgataaagcccactgtgcctcagagaaacaggttcagagaggggcgtccctgaggttgccaggtcaccacccatgttcctccagttaggggcctctcccaatgccaccgttttcttcttggcctctgcccatcgtatttgttttgctacctgagaccatggacaccttcaacttataaaattcctttcttcctgcacaggggaccctcacaatgatcccaatgctcagggggatgccttcaagactctcttcgtggcgagagtggtaagtccccagctcctagctcctggaaccccacgctgctgagagcctgggtctggcacaaaggtcaaataggctaggtacaggggaatgttccaggggctgtgggacagctctgttctcccatttaacgtcatatccatctccttgtagaattatgacacaacagaatccaagctccggagagagtttgaggtgtacggacctatcaaaagagtaagtggagtgggtcagggtgtttgaattgggggtgcatggaggaggggctgtatcctgagagggagggagagaggtcccagccctgagcatggctcacaccatttcagggcctggatttatgcatcctgactgtatctccatgcagcagaccttgggcagcagaagtaaaatgagaagtaatgactgctggtggttggttgagagcaggggttggcaaactacagacttaaagttttcctgctgctcagccaggcaggtctgtttgtttacacattgtctttggctgctactgttgtaaggcagggttggattgttgcaacagtatacggccgtccaagctggaaatatctactctctgggtcttggcagaatacctatgctgagtcccgttttagaggaaggctttgttttaccaatcttcttttaagtcactgaagtgctctgtgtctgatttcctttatctaacatgggagacgcatgccttcactgggcagtagtgagggcttgaggccatcctacacacaaactgatgttagccatgtctcttctccctgctctgtttctgatacgtcttttaaaaatatttatacatgtcaggccgggtgcaatggctcacacctgtaatctcagctcttaaggaggcagaggcgggaggatagcttaaacccaggagttcgagacctgcctgggcaatatagca[143 bp omitted]tgaaacctggtctgtacaaaaaaaaaaaaaatacaaaaattagctgggcatgatagcgggcgcccgtaatcccagctactgaggaggctgaggcaggagaattgcttgaacccaggaggcggaggttgcagtgagccgagatcacaccactgtactccagcctgggcaacagagtgggactccatcttaaaaaaaaaaaaaagtattgtaggctgggcgtggtagctcacgcctgtaatcccacatgttgggagggcgaggcaggcagatcacctgaggtcaggaggcaagaccagcctggccaacatggcgaaaccccgtctctacaaaaatacaaaagattagccgagtgtggtgtctcgtgcctgtgtgtgtgtgtgtatgtgcatgtgtatatatgtgtacacacacacacacacgttgttctgccttgcacagcccagtgacaaccttggccccacccttgtccctctgatccattcaagtcaggaatcttggttgtgttttggaggctgtggggtcccaggttcatccatgatacaggttggtcgccaactggtagtgatgtgaatggcgaactagccatcctttagggaccagctcaaatgctgttacctcccagaaatcttccctggttcattctggccacctctgtctcaacagccctgccttgcccgttgttctccctgacatggtccccaaggggtctttctgacatccagagctgaccccatctctgctgacagcatcccatgggtccctagcatgttaggacaggtccagctgccaccatctggccttccagggctcttccccaagctgtgtggcctcatggacctccaccccaccccatctcctcccttctcttgctgccatcctcgggatgggacgcatccctcatcgtgccacgttctctcaagcctccctggctgtgcacgtgtcctttctttttcccttagaacttccctgtccttggccaggcacagtggctcacgcccgtaatcccagcactttgggaggccgagaagggcagatcatgaggtcaggatttcaagaccagcctggccaacatggtgaaaccccatctctactaaagatacaaaaaattacccaggtgtggtggcgcacgcctgtaatcccagctacttgggaggctgaggcaggagaatcgcttgaacccgggaggtgcaggttgcagtgagctgagattgagccattgcactctagcctgggcaacagagcaagactctgtctccaaaaaaaaaaaaaaaaaaaagaattcccgtcccattggcattcacaactccctcctgtttccctaattccatttgtgtcctcctgactccacgtagaccacccacattggcccttccttgctcaacacccttcccagctcctcagcgaccacacttctcggcctggcattggggcgcttgatgaccccgggcctgcccacctttgtggcttcatctcctgggactctctgtcatcagtacatgagccagccctgccgaagcgcatccccagcctcctgccctcctgcccccgggcccttggacctctggagttactgctattccacctgacaggctgacacctcactgtcttccttcatctctcttctttctttaggtcttagcttaagtgtcattttctccaggaagccgcctctgtgtcctctgctcctgccattagaacataagtcactcagggctcttgaaggacagagagggtctgaggcctcatccggcccagggcctggtgtgcaggctgttgtggggttggtggggcggagccgccctgtggcaggactcacccctgtccccatgtgccccacagatacacatggtctacagtaagcggtcaggaaagccccgtggctatgccttcatcgagtacgaacacgagcgagacatgcactgtgagtacctcccgccgagccctgccctctgacctgctctcacttctctgctgccccagcccctcccagtctgtcccctcccccaccctgccacacctgacattagcgatgtctcttctcctcctccctctgtttctgatgtatcttttttttttttatatacgtgttttttaaaaaacaaaaaccaaatcccccacaacgtgtgtgtgtgtgtgaacctggggaggtaagtgtcacacgttgaacctcaggggcaaagagggaactgggtggggggctggggccagctggaggtggggggaggggtcggattttgggggaacctcccccattccccccactgaagttgggggtggccaggttgcaatgaggactggcctttgaacctgccctctcttccccccccagtagaactggggctgggccacccgaccctccgcttccccaaccctggccccccaccctgttcctcagcgggcagtggggtgataggcatgttgagcgcctgcccctacagttccaaagccccctttgaggctgccgcggcgtccacatgggcagggatgggtgggggagggtgggcagggctgcggcgtgtccaggggccgccgtattaattgactgttcttattgtcactgcagccaccacgcagctggcttgcagctgatgcttacgctccccttacaacacctcagtgtatggttggtataagggtttgtatcatgggtaagatcactcagcaccgcacaccagcccagcttagccaggcagctcaggagcagcgaggcgcccctcctcccaccccagtcgcccccgtagcctccccgcacccatggccctttccttgtttgggtgccctttgtccctcctgccccgatccgtatgctctctgagaatcttgctgatcccaggaggggaaggatgaacctggtgggaaaggcggcggcctctccgcttgggttccacccagcctctgatgacccggcttcgtgatgtcagcggcgaggtggcaggaacaccgagggcagggctccaggccagggctccactggagcccttcagccttccctccctgcccccgtgctttctatggggctgctactgtgctggccctggagagtctttttggctgctagttttggggtgctctgccccctttctgtcttccttactgtggttgaggcctcccgagggggctggctgtggtgtccagcagctctccagaggtggtcaggagctccctaaagtgcatggaattggggcttggggtgtgggagggaccaaggggtaggctgctagcagctgaaggtgtcgtaggtttttactaaagaaccttccactgtctagagacttgagagagggaaagagagagagaggcctagacgaacacaatcacatgttttctttgctgttcctcccgggatgggcctgttttggggtttgggactctgaacccgagcggggttccttcgcttgactttgatcctggtccttaaatgcctttccccactcccctcccgtgggttcaggggccaagcggcccctcctcagagcacgggcagcaccgtctcctggacccctgtgtgccagcctctgcagacgcagctggtgggagggagcatggatttggaggtggagaagtcactcctggtcctcggagggggtgggctgtgtgcctagttcagtgtgactcggggattggtgagggcggacaggtttctgaggcctccctagccttctttgtaaattcacacgagatagtccagggctttccagcgcccagcttggatgataatcctcgtctcccccactctaaggcctccttgagatttctttggggtctaccacgtcctctgcctgtctccaggtggtacaggagatgtggttcctctccctctcctggctccctagaaccccccacttcccctccctgtagctttagctgaccccgtggtggtgggtgtggggtctgtgcgcgtgctcaggtaagcttgggggctccaggtaagcggtcccgtgtcccccccccgggaagcccgcctcctcgccaggcccccaggagttgccgagccccccccatcccgctcggtttggacacccgcaaggccggcatcggtaaatggcacctttttctcttcctctggttgttatttgggggggagcgggctggggcggggcagggtattacggttggttgaggacagccccctaggccagggctgggtgggggaacggggactttttggccttcatgacagccccacgttgatcacaggccagggcctcaggcttgccttctgctacgcgctgcccgagagcagcagtgagcctctcccccgtctcccctctacgactcccctttcctggcaggctcaggctggggtgcgctcccagcacgtgttgagccgggggtgtggagggcgagatggggcagggctggggggaggcagagtcagtcgtctcaggtaaggcagggattttcagtagcaccgcacggctccccatgcttcctccactgcccctctcccctgctgcaggggccccgccaggccccctgggagtgtataacccgcctctctgctccctgccatttcctgaagatttctcccacccccttctggttcattttctgttctgatgtctgttccccccacactcacccccctccaaaaaaaacaaaaacagaaaaaaccggtgtggtctggggtgcggagcgtcccagctgggcctcctgccccggcttggtgtctcagggtgcatgcttggggttgtggaggagccccctcccccacagcagagtccagcgtggagttaaccttcagtttctttgcagcgattttggccgccctggcgggagggggctgttccatcatgtgggagaggaagggccggggagcctagggggtggcgggtgagggtggacgtctcccccgaccaggagtggttggggcgctgagaggaagcagacgctgagatggagcaggcccttcaccggtttgggagagggttggtctggctgtcagttgcctggctgtctgttgggcgtgtgcgtgtgcgtgatgatggggacacggggcggggattctgtagagctgggcctgtcctgactagaggaccctctggggactcctctcccctccccctccccacatctgttacagccgcttacaaacacgcagatggcaagaagattgatggcaggagggtccttgtggacgtggagaggggccgaaccgtgaagggctggaggccccggcggctaggtgagcacatcctgccttcgacgggctctcgggggccctgggcctggtggccttgttctcccttctctgctgctttctgcttctctgtctcctgccggcccacctctcccatcgcgtcctcatctccggcttctctctcttgtggccatcacatttctgacagctgcctgcctcctcgttctgggttactgtgaggagcaggggcaccagcctggagaggcctgagcccacatgctggcgtccgcccttgctagctgggggtccccttttcctgcctcattgtactcctcttagtggaaataaccccgagttcactgagctcagtgtactgggcgcccagcttggcagtgacgcatgctggggttgtaaatgtcactcgctcatctgcttctgctgcttgctgttgctcttgttcactcttttactgattcagcaagtacctattggatcaccagctgtgtgccgggcttctagttgagcaacacagaggcagcctctgccctctgagcctcctgcattcggtctcctcattgtcatttgctgtctcaggcaaggtcagtttggctgcaagtatcagaaataaacttgagcttcctgaaacataaagggccctgttgatgtagaatcatgggcatcctttggagttcggaggtatgtgatgtccgtggacctgagaacct[144 bp omitted]ctactaaaaatacaaaaattaactgggcgtggtggcgggtgcctgtaatcccatctactcgggaggctgaggcagagaattgcttaaacctgggaggcagaggttgcagtgagccaagatagagtcactgcattccatccagcctgggtgccagagcaagactctgtctcaaaaaaaaaaacaaaaaacaaaaaaactggggcgacccacctgtgatgtgtgacagcccacagcttgcttctgcctcgtttgcctccatgcagctaggtcggtcccatgcctctttgcactggcccagcgcagcaggccacaggccccagctttacactcagtcctggatgagtctcttgtttcggggtgggcacatttgattgactcagtgttgggcctggggtcctgttgctcaggcatgcttattgaggactgaatcctgcaaagctgagtgacagttgtcagagaagatgatggtccctgggcagacacccaggcagtagtagccacttggggctcctgtcctgcctcccagccctgtgtcctggctctggactcgcctgtgctagggagaccacgctctcagctgctgagcctcggagcttaccaggcatgttcttaccttactctggtctctctggggtggagtgggttcttatagctctgctgtttcctgttggggcgggaaaatgctagaatctcagtctttccagaatctcagaatcttctagttcaattgccattcaaactttttgttggtgttagccaataacatcttgactcggtgcacccgcagaaatactgtaacctaaagtttgaggaaacagttttttctatgtagtaagtatatagttgtattctgctgttttgtttcttaagatgttggttgcaacccatcagattgatgatgggactcatttctgggtcatgacctgaatataggaaaggctagtctagctgccctgtgcctgtgacatggcaggtgcctggtccgctgcctgcttctataagaatgtctccctgcagcctcttttctatacagaactcagccctgcctcacggaagcttttccaggcagtgcgagatagaggagcgcttgagaaggcaggttttgcagcagacggcagtgacagcccagttctgcaccttctttgctgagtcactgtgggccagtgacttgatctgagattgtttccccatcagaaccatgaggttatcatctgtgccttggggctgttcatctatctattcacttgacacacacacatccacctttctataccagctgcagcgccacctgctggtaccgtgagcaagagctgggcatgcccacggttccggtgccctgcagtctggtgggagaggcaggtaggggtcgactcaggtagcaaacctgaaactccaggggaaggaagcgtttctgcaactgtgagtacataggactgtgaggagagacttcccgagaaaggatgttcgggctagcgttaagggtgagcgtgagttcaccagagaaggaaggggagaccagtccagggcaaggagaatgcacagacactggcaggaaggtgagcgtggggacactgggaaaggcctgggacacgcagccaagagccgcggctcagacgctagcagggcccgctcttgctgcctctaccaccagttgacgaggagtttggaccttaggctgggggacgccagcaaaggcttctaagcagatcacatttttgggtggaaagatcattggcttcgggtttctgtgagggcgaggatgattggaagggagggttttgaggaggctgtgaagtgcgctatggttaagatgatgcgctttggggccagacatgggttccagtaacggctgttgcctagcgaacgctttgtgtgagttaattagagaagacgtggctgtcttgtgatgggagtgcgcgggatgaactgcacggggggacccggccctgtgaacactaagccaggggctgccttcctgccctttgctcttggagtcggctcatttctgctcctccgggccctgtccctgcccagattcaccctctgtccgtctgccctgccccaggaggaggcctcggtggtaccagaagaggaggggctgatgtgaacatccggcattcaggccgcgatgacacctcccgctacgatgagaggtaagattgggcgaccggtgtcctggggtggggggcggtcacggggggagcccagccacacaggtctgcccacctcatccaggcccggcccctccccgcttccgcacagggaccgggaccgggaccgtgagcgggagcgcagagagcggagccgggagcgagacaaggagcgagaacggcgacgctcccgctcccgggaccggcggaggcgctcacggagtcgcgacaaggaggagcggaggcgctccagggagcggagcaaggacaaggaccgggaccggaagcggcgaagcagccggagtcgggagcgggcccggcgggagcgggagcgcaaggaggagctgcgtggcggcggtggcgacatggcggagccctccgaggcgggtgacgcgccccctgatgatgggcctccaggggagctcgggcctgacggccctgacggtccagaggaaaagggccgggatcgtgaccgggagcgacggcggagccaccggagcgagcgcgagcggcgccgggaccgggatcgtgaccgtgaccgtgaccgcgagcacaaacggggggagcggggcagtgagcggggcagggatgaggcccgaggtgggggcggtggccaggacaacgggctggagggtctgggcaacgacagccgagacatgtacatggagtctgagggcggcgacggctacctggctccggagaatgggtatttgatggaggctgcgccggagtgaagaggtcgtcctctccatctgctgtgtttggacgcgttcctgcccagccccttgctgtcatcccctcccccaaccttggccacttgagtttgtcctccaagggtaggtgtctcatttgttctggccccttggatttaaaaataaaattaatttcctgttgatagtgggcacctcggtttcttcctcactgctctgttttccccagaaggttgttcctgacttgatagccctgcttggtttggtttccagggtgtacttaaaacttgagcgttaggacatgaggctggctctgcccagtagccagagctgttgaaagtggggtgaggcggcctctcgggctccttgtctcccttgtgtttttcacccttttttctttttcatctctgccacacattcctcagggctgaccatacccctgtcttggtggggggctgggaattaggagggggcttgattactcaggggaagccgcagttttgaatatgcaagggaagctaccatctgcaagggagagcggcacacagggtgaggaaaggcagaatacactgggcacgggtgagacggggcagagcaggaagggtggacccacatcataataagtagtgacagaggagcaacgagcagaaacacagaagaggttccaccagcaattgagatttcaagcagattcctggacaaaagattaaagacattggtggtgagaacacttcagtctggtgagtgcagggaaggaagcctgtcagccttgcagaaccctagagggccaaggctgcagctccaggagagcaagggtgggaggccagagggagagcggggtacagaacagttggcctccctgttggcactcaggatgcctgggagctgggccgggggtgcctaggcaaacctgcttgtgttcagacctgcttgtgtcttgtagaagcgtctcagcctgaaggcaaacttggcctgataactcagagggtctgtgactgacacgcaggatttcagtctgctttttaatggcttcagtttaaccaacggaggatacccagacatttgaggaaaaacagaccacaagataaatagaaaaactgaccctggaagaaatgacttaggaataaaagaacttcatacctctagttactatatttcatagatatcccagatactgcaactataagacttctagtattggctacaagaagcccattttggactaacatggcacagactggttacataaaggctggacaataggcaaaaacttagaaaaggcgccagaaagtggccagctttgatgaggcttgagggggtgtgatccgttaagagaacacacaggtgtgtttcgcacttacccttgccttttccttgaggatgttttgccatttagcatgaggaagtcaggcgggactgacttccactgggccaagttcacagaggttcagccaggcagctgggacttgacgaaacaggagaggagggcactgacctcccaaatctacgtgcaccctcccttagaggcatctgccaactcaagctgctcactatctgcaagacccccccccccaagaaactcatcagaatgcagtaactgggaggctaaggaactggtggcctggagactgcagcagccatgctgttctaggggagacaggttggggttcaaggcccaccatggattggctctgcttgagatggccagggtgcctcaatgtcagagtaacgccataacagaagaaatcagactaagaggctgggcatggtggctcatgcttgtaatcccagcacttcgggaagcagaggtgggtggattacttgaggtcaggagttcaagactagcctggccaacatggcaaaaccctgtctctaccaaaaatacaaaaattaccctgaggccaggtgcggtggctcatgcctgtaatcccagctctttgggaggctgaggtgggcagaccacctgaggtcaggagtttgagaccatcctggccaacatggcaaaacccaatctctactaaaaaatacaaagcattagccaggcatggtagtgagcacctgtaatcccaggtactcgggaggctgaggcagaattgcttgaacctgggaggtggaggttgcagtgagccgagatggtgccattgcactccagcccgggcaacagagtgagactccatctcaaaaagaataaataaataatcaatcaggctaagaaagcctaaaaccagactttttcaggatttaggcagtctgctagtcagaagaaaactctggaagaagataacgttccgagtctccacatgtactatttttagtacccattactcagcatctactcaatagttaccagccttgctagaaaggacttaatttgctgaaaaccaagagggaaacaaaatagacaatagaaagagacccaggcaggggtgattcagatgttggagttatcataactatgatatattcacaaaataaggaaaagatggagaatgttgagatatctggaatctagctacttgagaggcagaggtaggaggattctttaagccaaggagtttgagattcagtgagctatgatcacaccactgcactccagcctgggtgacaggaagaccctgcctcaaaaaaaaaaaaaaaatctggaatctaacaaaaagttaaatggcaattctagaactagaaaacacaagtgaaattaagaattaagtaggtggtggccaggcatggtggctctgtaaactcaacactttgggaagccaaggtgggaggatcacttgagcccaggagatggagaccagcctgggcaacatcgcaaaagcctggtctctacaaaaaatacaaaaattagccaaacgtggtggcgtgcgcctatggtcccagataggaggctgaggtggaaggattacctgagcccagggaggtaaaggctgcagtgagccatgattgcacaactgctcttcagcctgggcaacaaagtgagaccctgtaacgacaacaacaacaaaacacacacacacacacacacacacacacacatatatatgtatatatagagagagaaatagcatgttacttagacacagaagcagctctcagactaaacatctgtaagttccctctcacagtgagtagagttaggagaggtagaggctggtgcttttcactattattagcctgtctgtgttatttgattttgtttttaatcccataaagacattactttttgctaaagagagagctacagtgaaggagacagccagacaaacctgctctagtcctcccacttggaacaagcacttttctggactccatatcgccacccagcagaaccagaagagcagccaactttctccaaagtcttgtccacatctcctcggcctctctagagcatgataccactgaccacttcctttttttattttttatttatttatttaattttccaagatggagtttcgctcttatttcccaggctggagtgtaatggcacgatctcggctcactacaacctccacctcctgggttcaagctattctcctgcctcagcctcccaaatagctgggattacaggcacccgccaccacgcccagctaattttttgtatttttaggagagatggggtttcatgaagttggccaggctggtctcaaactcctgacctcaggtgatccgcccgcctcagcctcccaaaatgcttacaggcgtgaccaccacacctggcctcactttttttgtttgtttgtttgtttgagacggagtttcgctgtttttcccaaagctggaatgcaatggcatgatctccgctcaccgcaacctccgcctcttgggttcaagcagttctcctgcctcagcctccccagtagttgggattacaggcatgcaccaccatgcctggctacttttgtatttttagtacagacagggtttctccatgtggtcaggctggtctcctgacctcaggcgatccacccgcctcggccccccaaagtgctgggattccaggcgtgagccaccatgcccagccacacttctttttaaaaacactcgcagccagacacagcggttcgtgcctgtaaactcagcactttgggaggccaaggcagggggattgtttgagcccaggagttcaagaccagcctgagcaacaaagacccctccatctaaaacaaacaaaaaaagaagataaaatttaaaaacccctcttctcatggtttctcccacctgggtttctgcctacatttcaggccattctctgctgtcctcctgacttttaagtgttagagaggtctggggaccagttctaggccgtcttaatattcgcttgcccctgacattcttatccactccggtggttttatttaccacctatgccccaatattcaaacatgcctgcagaccaggttgctcttttgagccctagacctagatcgatagtttctccccatggattctgcataggctcctcaaattcaaaatatccagtatcggccaggcaaggtggctcgcgcctgtaatcccagcactttgggaggctgaggcaggtggatcacttgaggtcaggagttcgagaccagcctggccatcatggtgaaaccccatctctatgaaaaatacaaaaatttggcaggtgtggaggtgcacacctgtactctcagctactcaggaggctgaggcaggagaattgcttgcacccgggaggcagaggttgcaatgagccgagatcacgccactgcactcgagactgggcaacagagggaagactgtgtctcaaaaacaaaatatccagtatccctctttcagtgtagaccatcttaaaaatggcaccaaagcaccttaatactgtcttctcctgcacctcccaatccccttatatagccaagcaccaaggcttgtctagacatttcccacatctgcccacccatcttctgtgctttggccctggtgctagctgccacctggatggctgtggtagcctcgtaagttgccccgctgcttctcctcttgttcttgtccaaaccagtctccacagtggctacagtgattttttttttttcaatagatacgaggtctcactatattgcctatgctggtcttgaactcctgggctcaagtagtcttgctgcagcctcccaaagcgctaggattacaggtgtgagccaccgtgcccggccccagtgatcttaaaatacaaatttgaggcccaacctgggcgacagagcgaggctccgtctcaaaaataataataataataatataataataatacaaatttgagtgtcatatttttctcttaggagtttgcatgaagccccaaatcctcaaggcgcatatgccaacgcaggagcccaggcataaactatcctgccgaccttttcacctcatcatcaaccaatcctaactctgcttccagccacgtgggctctttctgggtggtgggggtgacccaagctccacctcttgttcatcttacctcccaggactgtatgtcaatgtccctcctctaggatttccttcgttttctagatcatcacctccccactctcagctctcatcacagccgtagttggtcgtctacctcccctatagactggaagcttcgttcgggccgtgggcttggctgtcctgctcaccacggtgtccatgacttgggctcagatgtttcacaagagtttgttgaatgaatgtggggaaaggatggacaggggatagacgggtgtggagggcaggcagacacggatcctgaaaggtacacacagaccgaacctgcagtgggaggggtcgccaacaggaccgactggccggggcggagggcagggcgcggctggcgcgcggcaggtggtcggagcagtcgggcgagggagagctgggcgctctccaggctgcgcctccgcagggggcgcccgtggcccggggcgtggcctcgcgcagccccgccctcctcgccggcgccagggcaggcgggcggctggcagctgtggcgccgacatggctgcgctggtggagccgctggggctggagcggggtaagcgtgcgccagggggccctgcccacccgggccgcggcctacatacccagcccccggtccccgcccttcccgggtcaggccagtgcgggtgggccagcggacccggagggggtgggcggggcgggcgccggggccgggcggtcgctaggtgtgggaggctccctgggcgcgggccgggacgctgggcgcccgccttacaacccggcctgtggaggggtcccggggccgcagggccgctggtggcagtctctcctgcgccaccctggactctgcggggtgtccgactaggcttcggccgtcctccccggactgtgcgctcggcctcactccgccgctctccttgcttctctgcgtctcggggtctctgacactcggggtttctgcgccccgcccccgccccgcagacgtgtcccgggcggttgagctcctcgagcggctccagcgcagcggggagctgccgccgcagaagctgcaggccctccagcgagttctgcagagccgcttctgctccgctatccgagaggtgaggggcgcgcggcgcaggggcgcgagctggtggccgtcgtcctcctcctcctcctcctgcttgtcccgagcccggagactacgcctcccggcagctcccgaggcggcccgccttggggtgccaacgcttcagctcaggggttcttcgggagttgtagttttctcggccttctgttgcgggggcggggcggatccttgcgtggtagcgggagagggtctagaggcctgaactcctgcgtctagggctggaggagctggcgactccctgatgccgctgcctcctcacccaggtgtatgagcagctttatgacacgctggacatcaccggcagcgccgagatccgagcccatgccacagccaaggtgggccccgcaccccattgctcctggtgtctatttaactgcctagtcgaactcaatatctccttcatgccagtcatttctgtttcctccctcatgatttttgctaaatctatgtgccaccttactattagtaaataatcgcacatttttaacttaaatgtcatactaaggcatctttagcaactgcaaatggaaacagtatggcatggttggtagaagataaccttcaacatctgtacagtgcaaaccaggaaactcatggcgctctgacctctcactgcacaatagttagatgctgctacctcttgctgctgtccggaggctcagatctccctccaggcctggctttcctctgtttaaaagtaagattgaggccaggcacggtggctcacgcctgtaatcccaacactttgggaggccgaggcaggtggatcagttgaggtcaggagttcgagaccagcctggccaacatggtgaaaccccgtctccacagaaatacaaaaaaaaaaaaaaagaaagaaaaagccgagcgtggtggcgagtgcctgtaatcccagctggattacaactccggaggctgagacaggagaatcgcttgaacccaggaggccgaggttgcagtgagccgagatcatgccattgcactccagcctgggcaacagagtgagacttcatctcaaaaaaaaaaaaaaagtaagattggcaagtatggggtattcaagacacacaccaaatggacactttctcttgcaagtgaacagaaagagacgcacagtcattacagggggatcgtgcattgtgccatgacaagtgtcccatgcttggggatagtaacccaggctaaatcgctgtcctcggtccacatcccccaccccagctttcatgcctacctggaaggggccctcatcttcagtcgctttctctctcccaggccacagtggctgccttcacagccagcgagggccacgcacatcccagggtagtggagctacccaagacggatgagggcctaggcttcaacatcatgggtggcaaagagcaaaactcgcccatctacatctcccgggtcatcccagggggtgtggctgaccgccatggaggcctcaagcgtggggatcaactgttgtcggtgaacggtgtggtgagtggagggctgaggcaggactgggggacacagtctgtctaacgtagcatagcccctgcttttgacattcactcaacacacactgagtgttgtctgtatggctagccctgtgctgggcaatgttacagactctgagagatgttggcctcagctccctacactcaaccttctctctctggggagggcagtaggccccggctgaaatagtcctaatccagagacataataatgaggaagtgcaaagtattgtgacagcccagatgtggcaccaggccagcatagatacaggaaggttttgcagagtaaggaacatttgggttgggtgttaaaggatgagtaggagttctccaggcaaacaaggtacagggtgttcctgctgagggtactgtagataaggatactgacttggcatacctctgagctgaaaagaaagggcttagttctgatggaggtctggggcatgcaggtaattaaaatcactgtggttaggctgggtgcggtggctcacacctgtaatcccagcactttgggaggctgaggcacgtggatcacttgaggtcaggagttcaagaccagcctggccaacatggtgaaatcccatctctactaaaaatacaaaaattagccaggtgtggtggcaggcacctgtaatcccagctacttgggagggtgaggcaggagaatcgcttgaacctgggaggcagaggttgcagtgagctgagatagcaccactgcactccagcgtgggtgacagagtgagactccctctcaaaaaaaaaaaaaaaaaacaaaactcactgtggttagagttgagggaagcataactggagagatggctggggtcagccatacaggacctgagtgccagcctgagaagctgggactttgtcccatgggtgctggggagctatgggaggggtgagccagggataaactcagcttgcaggtgcagaaggaccactctgggactctatgggagatgaactgaggggagagattagaagccaggccagggaggaggctggggtaagagtccagagaaaagaggacaaggcctgagctggcccagggctgtggggacaaaaaagagggagtcaaggcgggcggacattagtgggctgtgggcagggaggccacaaagatgggtctggacgtttggccagggactgagggaacacggggctgtccctgacatgggaatcctgggaggttttggaggaggacactgaaccaggagttaatgactcccacgaggaggacatgaggcattgacatctcagggctggcaccaggctcactagcagtgggtcccatctcccagtgggggctggacgagggcagcgggccccaggctcagctgtctgtgttgggccctgcagagcgttgagggtgagcagcatgagaaggcggtggagctgctgaaggcggcccagggctcggtgaagctggttgtccgttacacaccgcgagtgctggaggagatggaggcccggttcgagaagatgcgctctgcccgccggcgccaacagcatcagagctactcgtgagcccctgggtcaccacacccctggggcctccacgggctccctttaaccccaggctcccaaaccaggccagtgcttcctggatcttccagccctggcccctcctctgggatcctgacccttgacccttggcccaggctctcaccccaggctagtttggccaaatcccctggggagcccttagcttccttccatcccaagatacggaacctactgtggctgggatccctcagcccacttacctgggcccttgcctctgcaaccccagtcctgcccctcttgtctacccggagcctccctgatcccgggtcccttgtccaccccccttgcaggtccttggagtctcgaggttgaaaccacagatctggacgttcacgtgcactctcttcctgtacagtatttattgttcctggcactttatttaaagatatttgaccctcactgagtgtctgtgtgtctgtcctgcatccctgggttggtgtcttgagatgtggagggaatgcgaggagctgaggtcaggccaagccgttgagaagccttttccagagtctgagaacagaggttaagacctctccctaggtctgaaggcggagacaggccggcttccaagagactagtccgagggcggagggcggaggcagggacccagtctgggtctgagtgctggggcagaactgaggacaacgctgcctacccttaagagcgtctgagggcgaaggccaagtcccttcctccagagtcctgaaacgcagccggagccagtgggcggcctctgtgtgggcggggcggagcgaaccattagcctcgtccgccgggggaaccctgcaggccgcactactgtctgcgtgggagtcgcgggtgggggtgccgcgtgcagttcccgaggcgggcgcaggggtgcagaatgaggtgccctcgcccaccgggcgctcactccaccttccaaacacagcgcgtctttccggaagcagcccccgccttgaaatccaacctttagcctcatcccgctgcccgcccagccctcgtgtcccgtgcggcgcgagggctagtgcgcgccactgccgggagccggggtcgcgactcgcgttccacgccgcgcgctactcgctccaggtgacatcatccccctgccgggctccgcctcccgccccagccgcctcacgccgcgtgcctattggtcgacgcgccttatgccccgcctctcgctctccgcccgcgcgacccctcccggccggtgtggaggcggggtctagtcgccggccggcgccgacgctctctcccattggccgctcttcgccgtctgtcagtctcctgttaaaggggccacgaccgcccgggagccgtggggggggagggggagggaggaggaatttttttggggggaaggtgggatttggggggcgctggtgggcacccctggatctggcggctgcggcctcgcggggggaggctgatcggtgacaggggcagggggctattttgggggtagaaggcagtgagagcgtgagggggaggggggtccccagcgcccaagccggagccagagacgcggagcccgcgcgagcgtcggagacagggctccagggctccgaagcgacagagccgggccccggccgctgccaggggccccgcccggcccccccactccaccccacgtccctcctgcagcccagctccgcccgcagccgccgcggaccaggcaggtaagagcccggcccggccctcctggcagcgcccaccctggggaccccttggcgagcctcccccgcctccccgagatcccggattcccttcctcatcccaggggacccccgagcccagatttcacaccccaaccccggggactcaggcgtgcccctcccggcgcccagagtccccgaccgaaccctagaatcccgggcgcaccgccgcctcgcgcctcctccagggcccaggagcttggatttcccggtccggccccgggacccctcctagagcctagatcccccttcctgaccctgtcctgggagctccagacacccgccgcggcggtgccagactccccagacgcgtccgcatcgtccccgcttcgcgcactccgtctcccgtcgccagcctcgggcttgcacagccggctgcgtcccacggtccaggcaggctcggcggccgccctggacacaggcccgctctggagctgtccatggtcagcgcgctcggcagcctcgcctccccccacctcctgccgccgccaccagggagggggcgcaggcggcgcggggatccccccgccgcgcctttgacccgggaatacccgggccctccccgaccagggcgccccagcctctgggttctgccggccaggctcgtggccccgtcctcggcaccccaggttcctgggactccagctgctccctgaggatccagggcttctgaattttcctattctggtcgccgtggggaccatggcacccggggatgcagctcccaccccgttcgggaagcctgtccgtgtctacacctctgctggccccaggtggtagccctcaccccgtcagcacctaggaatcctgttccccagcgtttgctctgcttagaaccccgctgtgccctgcagacacacagacttagcctcctggcacccagcatctgctccccgagggactcaggcgccatgactcctttcctttgggggacccggaatgtgattctcaatgcagttctctgacttctgttcacactcccacttggggacctaaatgtcttggtcccagtctcctatcccctcagggacccaggagttcagaccccagcttccgtactgcccaccagcttttactgaggctgtctgcctcaaccctctctccaaacaagacctcaggctctcaccttccaatcccccatcatttacctccacaaggattcaggagtccaggctcccagctctgtccactgccctccccagcaggtatctagtttctcaggtctcacttttaggaaccaggtcttcacagcctcatcactctgccccatcaacttcacatctcctgtggccctaccaaacccctgtctcatcctcatgtcaccccaggtggcgggcttcaggactctctactctttcccctaagatgcagcttgttgagatgtttctagcactccattgccccctgaggctcagatgagttccccttctccaagtacactctcccaggccaatgagccgaacacacatcacctcctccagatgtattctgtggcctgggctcataaggagatctagaagctacctgctgccatacaaatttctttctttctatttatttatttatttattttgagacaaggtctctgttgcccaggctggagtgcactggcacaatcacagctcactgcagcctccacctcctaggctcaggtcatcttcccaccttagccgcctgagtagctgggaccacaagcactcaccaccaggcctggctaattaaaaaaaaatttttttggccaggcgcggtggctcatgccggtaatcccagcactttgggaggctgaagcgggcggatcacctgaggtcaggattttgagaccagcctggccaacatggagaaaccctgtctctactaaaaatacaaaattagccaggcgtggtggcacatgcctgtaatcccagctactcaggaggctgaggcaggagagtcgtttgaaccccggaggcggaggttgcattgagctgagatcgtgccactgcactccagcctgaacgacaagagcgaaactctgtctcaaaaaaaaattttatttatttatttatttatttattttttgtagagatgggggtttcgccatgttgcccagactggtctgaaactcctaggctcaagggatccttctctgttggctcccaaaagtgctgggattacaggcatggccatcgcgcctggccgggccacatttcttgtcgcacatgtgctcttgcattgctccatgttctagattccttctaaacaccagaacactcccagctgatgtctgttctgtgttccattttcattccaggcatggtctgagttctaggccagatgccaatttttttttttttttttttgagacggagtttcactcttgttgctcaggctggagtgcaatgctgcgatcttggctcaccacaacctctgcctcccgcgttcaagcgattctcctgcctcagcctcctgagtagctgggattacaggcgcctaccaccatgcccggctaattttttgtatttttagtagagatgggggtttctccatgttggtcagactagtctcgagttcccgacctcaggtgatcacctgcctcggcctcccaaagtgctgggattataggcgtgagccactgtgcacagcctttgtttttttcatatatttagataagacccctgagccagattctgatcccaccatatcctcagacatgttccaaagttctaacaacaagtccttccttctttgctaaatgttcatttcaagtgtgttccaggtttcagccacgttgttctagattccattctcttcccaggagcaatctaacttctaagatgtgtgtgttccaagtatgtgctctaggcttcctaattcgtgccattgattctagaatgcccttccctgtttccctgttttaggttctaaggaagttctatctaattgcacattcttttttgttgttgttgttgtttagttgttttttttttttttttttttggcgggggatggagtctcactctgtctcccaggctggagtgcagtggcgcaatctcagctcactgcaagctccgccttctgggttcacaccattttcctgcctcagcctcccaagtagctgggacaacaggcgcccaccaccacgcccggctaatattttgtatttttggtagagacggggtatcaccgtgttagccaggatggtctctatctgttaacctcgtgatccacctgcctctgcctcccaaagtgttgggattacaggcaggagccaccacgcccggcctgttgtttagtttttattttatttttgagacggagtctcactctgtcacccaggctggagtgcagtggtatgatctcagctcactgcaacctctgcctcccgggttcaaacaattctcctgcctcagcctcccaaatagctgggactacaggcacatgccaccacgcctggctaattttttttgtatttttaatagagacagggttttgccatgttggccaggctggtctcgaactcctgacctcaagtgatccccctcctgcctcccaaagtgctgggattacaggtgtgagccaccacgcccggcctgttatcgttgtttagacattggatctcattatgttactgaggcgatcctctcaccttggccttccaaagtgctggaattacaagcatgagccactgtgcctggccctaatttcacattcttttttttttgagatcgagtctcactctgttgcccaggccagagtgcagtgacgcaatcccggctcactgcaacctccgcctcccgtgttcaagcaaattctcctgcctcagcccctcgaggagctgggattacaggtgtgtaccaccatgcctggctaatttttgtgtttttagtagagatggggtttcaccatgttggctaggctggtctcgaaatcctgacctcaaatgatcccccgggctcagcctcccaaaatgctgggattacaggcgtgaaccaccgcacctggcctcatgttcttaaatgtaaaagattcccagtgaagtgttctacataatgttttccttcccccggttctaggttctaggcccattcattttctgtcattttttccccagtgcagccttagtttagaacttgtcccctggtggatcgtgggttttctcctccatctgccactttggcattctaagcttgttctaggctctctcttcttctggagccttcagcctagaaatgtccttatttccagaacagcccccctcctttgccagcctcagtctttattccaggaaatgctcaattctcaacatgcatccttttgatccctccccctccccgccctatagacacttgtaagttccaagcaaactcttagacacatgataaaaccaaggatgtgactcctgctatattcttttttaaaaatgtaattaaatttttaaaaaatctatttatttatttattttgagaccaggttatgagactggttaatttttgtatttttttgtagagacagggtttcaccatgtttcccaggctggtctcaaacccctgggctcgagtgatcctcccaccttggcctcccatagtgctgggattacaggcatgagccaccgcgcctggccccctgctatattctgtgttataccttcatccctagcaggctctgagttctagattttatctgctgactatgtttgttatgtgttgcattaggtatattaatgggtgtcattatgtatgtggggttctggggtgacctggacactaagttattgggttgctcttggctggttctagattataggcttcagaacttagttctagattacttaggcctatgagcggttcttaccccaagccattgaaagcgtggaagcatacgtctattccccaccctgtactgtgtgtagtaaccttctaggttctatgtccagccttgctgtgttttttatttccttctcggtcaatttaaggctctggaacaggctccccaaaacatctgtgttgcatcgtcagagtgggttgctg[146 bp omitted]aaaataattagccgggcgtggcggcacgagcctgtagtcgcagttacttgggaagctgaggcaggagaatcgcttgaacccgggaggcagaggttgcagtgagccgagatcacgccagcgcactccagcctgggcgatagagtgagactccgtctcaaaaaaaaaaaatagagatcatgttggttttttgcctatggctggcttgccctcttagaatcgttttcctgaatctttcctctgagtgctgggattcgcctgcctagattctcagatgcaccacttcaaacacccaaggggacaggaacccagctgcctcctctcccagggcccacggccctcaggccctcctctcctcacagaagtccaaggccccattcccaggctttggacacagtccgcatattgggcggggctgggaattatccacgctcagaccggttatgcgttgcccgcagggagagaaggaaaagaaggaactgagtgaaagtccctcctgctttccgccgggccagctggacccgtcggacctgatgtgtgtggagggagcggttcagggggcctggcttcatctccgccctgcccctggctctagggacccaagtccaggcttcccgccccagaaaccccgccccttccttgtcccccgcccttgggtatagcttcaagagggctggggctggggttggtgggagcgtcccagaactcctgggtcctggaggaggagctgtgcacccaggggcctgggggaggaggagcctgaagcctgggacttctgggtctaagcgaggaagctgagagcccagactgttgtctcttaggggaggagaggggtgcggtctccgactcctgggaatggggaggtgggggctggaggcgcaggctcctggggtctgagagacgaaagggactgggtcttagactcctgtgacctgagggaggcgggagctagttcttggacttctgggtcgtgaagagggtgaagaagtgacaagcatggtcctggccatactggtattttttttgtttttttttgtttgtttgtttgttttgtttttttttgagactgggtctctctatatcgccaagctggagtgcagtggcacgatcttggctcaccgcaacctctgcctcccgggttcaagcgattctcctgcctcagcctcccgagtagctgggactacaggtgcgtgccaccacgcaagctaatttttgtatttttagtagagatggggtttcaccatgttggccaggctgggctcaatctcttgacctcgtgatccaacagcctcagcctcccaaagtgctgggattacatgagtgggccaccttgcccggccgttactgtgttttttttttgaaatggaatctcacactgttgcccaggctggagttcagtggtgctatctcggctcactctaacctccacctcccgggttcaagcgattcttgtgcctcagcctccccagtggctgggactacaggtgcatgccaccatgcccggctaattttttttgtatttttagtagagacgggggtcac[131 bp omitted]cttttcccgaatggagtaggtctttagattcttagggagccggggtccagatttctgggaaattgaaggaggcaggagttgggctggctagtaggtgagaccaaccctgtgacattatacaggtaaccacatcctagtgacctaatcctgggtcccttggccctgtggccttcttaaggcatggttctggtctgggcctcagttttcctacccatgcagtgggttgagggggattctcagtagagccagaataggtagacactgattttctccacattcactcatacgataccagggtcggccagctttggttcctttgagtgggctaggcttaggtttgctgccactgtctgttggagtctgacctcagttttcccaaatcctctcacccaggtagccaggactgttttcctaagagcaatggcacaggcacagtggcatactttgggatgctgaggcaggaggatcccttgagtccaggagtgagacctca[134 bp omitted]cttgtctctactaaaaatacaaaaattagctgggcatggtggcgggttcctgtaatcccagctactcgggaggctgagggaggagaattgcttgaaccgggacccgggaggtggaggctgcagtgagccgagatcgcatcactgcactccagcctgggtgacagatcactccagctaaaaaaaaaaaaaaaaaaaaaaaagaaagtagggaaaggaaaagaaaagaaaagaaaagaaaaaaattagccaggtatgctggtgtgtgcctgtagtcgcagctactcaggaggctgagttgggaggactgctcgagtctgggtcgttcaggctgcagtgggccgtgatcgcgccactgaactccagcctgggtgacagagtgagaccctgttaaaaaaaaataataataataataggcctcagtttcccctggcagcacctggtggccaatctttggtttccccggtggagtgacagggtggcggtgcctgtttccctgtgtcatgatcacagtgcctgggcctcagtttcttctgtgcagtgcttggtttgcccccaactatttcccctacgtggtatccgagtggctgtgcctcagtttctctgttgtgccttgacaaggccggtctgttccttgccctccccgccccgcaggcccgcaccgccgccatgatgtgcgaggtgatgcccaccatcagcgaggatggccggcggggctcggcgctgggcccggacgaggcgggcggggagctggagcgcctcatggtcacgatgctcacggagcgcgagcgcctgctggagacgctgcgcgaggcacaggacgggttggctacagcgcagctgcggctgcgcgagctcggccacgagaaggactcgctgcagcgccagctcagcatcgcgctgccccaggtctgggcgggacaggggcggggcatgagggggcggggcctcggggggaagaaggcggtccggaaggggccgggcttggcgcctggaagggaggagtctgggcgaggcttgccgttaatgggcggggcctgagtggcaagggacagcgggacttagcagggagggcgggaccttcaaacttccagtcccagtgaatgaaggagacagggaaaggattgagccgaatgtccagatcctgccaatgtctggacaggagtttgcagctctgacgaaggagctgaacttatgtcgggagcagctgctggagagggaggaagagattgcagagctgaaggcggaacggaacaacacgcgggtgaggggtgttgagggcggggcctaagtgggggcggggcctcgtggtgttgaagtggggggcggggcctctcagtgttgcagcgtgacctatttttttcccccatctcgcctttctgtcttctcctcttccctgctcccacttcctggctggtctcccactctggtgccactccttcctccctgtctccataacttttctcttttctgtaccaccggttccttgaccccgacctcctctcttttcctgacctgtctcggtgctcctttatatggctccatcttttcctccatgtgtccgccctacctgtcaccctttttctcacatctgccccttttcccttgcctcttttccttgaccccatgccgtgtgcttgcagctgctcctggaacacctggagtgcctggtgtccaggcacgagaggtcactgcgcatgaccgtggtgaagcgccaggcccagtccccgggtggggtctcctcggaggtagaagtgctcaaagctctaaagtctctcttcgagcaccacaaggccctggatgagaaggtatgagaattagaagagcaggggtggagaatggaaacctatagttgactggggctgttctgagtgggagagattctggccgtgattggttggggatgttctgagttggaagaatgttgactgtgattgattgggacaggatacatagactgggacctgactggttgatagcagaaaaataaaccaggatgggggctaacagtggatggggcagattggatagctggttgcggctgcatacccgttatggagacaggagccccaacgctgccctatcggatccgtcccaggggtgttctggaccaggggcaactgtcctaaactggatcttgtctccagctgactgttgccctgccccgatccccaggtccgggagcggctgcggatggcgctggagcgcgtggcagtgctcgaggaggagctggaactgagcaatcaggaggtgtgggtgtggccaagacagggaatttgaatccaaggggaggggctaaggggctgcccacggggcggagccggttgggtgggttccagagagaatctattggggcaggactagggcagacaagctatggggttggactatggagagaaaccagtggggttcctaagtgggcacgcattgcgcagggctacggggagaatctcccagtgagagtgagattaagggtagaaccaggggctggggctcaggctgggactaaggaggaagtgattgaatggggaaaagcggggctaaagcggaaactttgtccaggaggctaaggggaagagtaagggtagacgccctccgtggtggcagctaaggagggatataaggagggagggagcctaagggtaaaccgtggggtaggcatggccccagcacgaccggaggcatctcatatggggccgcctatccccttagagggccaatgccagtgagaactagagctgggggttcagggagcccctgtgctctgattcccctttcacacttccagactctgaaccttcgagaacagctgtctaggcggcggtcagggctggaagagccgggcaaggatggggatgggcaggtgagacatggaagtcccctctccgtgagctccattcaactccctgactttgtgatagtgtttgtaacgtttggtatcatcctcactggccctaagacggctgcacctgtaagagtgtcacagagcttggacctctgattcaggtcacctagcgaacttctgtgacctccttcactgacccccgtggactctgaccagcatgatccttattgatctttgatctactttcagctgattgactttctccttggatttcctctgtgtctccggagacactctgggatcttgtcccctccttccctcactccagactcttgccaatggcctgggtcctggcggggattccaaccggcgcacagcagagctggaggaggccctggagcggcagcgcgccgaggtgtgccagctgcgggagcgcctggcggtgctgtgccgtcagatgagccagctggaggaggagttgggcaccgcgcaccgtgagctgggcaaggcagaggaagccaactccaagctgcagcgcgacctcaaggaggtgaggcccccagggaggcgggctgccctgggtccctcgcctttccgtagagctctccctcgcgcattgctcatgaatggcggaacctcgattcagtccacaggctgggtgactcctctttgagattcagttttcccacctgtgaaaggaaatgtatgattctcatcagagggtgagcctgtggcgcagagtaggcgctccataactgctcgtaattactttgttacctaactttgggttcttctctggtgcctctaaatggattttttttttcttttgtgaggcagagtctggctgtgtcgcccaggctggagtgcagtggcgtgatcttggcttactgccacctctgcctcccgggttcaagagattctcctgcctcagcctcccaagtagctagaactacaggcacctgccaccatgcaccgctaatttttttttttttttttgtatttttagtagagatggggtttcactatgttggccaggctagtcttgaactcttgatccgcccacctcggcctcccaaagtgttgggattacagtagtgagccaccgcacccagcctctttttttttttttttttttttgagatggagtctagctgtgtcgcccaggctggagtgcagtgtcgggatcttggctcactgcaacctctgcctcccaggttcaagcgattctcctgcctcagcctccctagtagctgggactacaggtgtgcaccaccacacctggctaatttttttttttttttttttttgtatcttcagtagaaatggggtttcactatattggccaggctggtctcgaactcctgacctcaagtgatcagctcgcctcggcccaaagtgctgggattacaggtgtgagccactgcgtccagcctctaaatggaatgttttgtgggtatttcacccctttctggcttaggccgctttatcctaatcccagtgaccccagggagctgctgggaaatgtggacctggattcttgaaggcagtggatgagaaagaagagtgagcactaggactagcctgggcaacatagcgagaccccgtcactacttaaaaaaaaaattagccgggcgtggtggtgggt[140 bp omitted]cccgtctccactaaaaatacaaaaaattagccgggcgtg[135 bp omitted]caaaaaaaaaaaaaaaaaaaaagttgaggcataagaatcacttgagcttgggaggtggaagttgcagtaagccgagatccgtaccactgcactccagccagagtgctggttgctcatgcctgtaatcccagcactttgggagaccaaggcaggcacatcacctgaggtcaggagttcaagactagcctggccaacatcgtgaaacccccgtctctactgaaaatacaaaaattagccaggcatggcagcgggtgcctgtaatcccagctacttgagaggttgaggcaggagaatcgtttgaacccaggaggtggaggttgcagtgagccgagatcgcaccactgcactctagcctgggtgacggagcaagactctctctctcaaaaaaaaaaaaaaaaaaaaaaaaaaaaaagaaagagagagagagaaccttcatctgggattttaagcctggatagccgcaggggctattgggaaatgtagccccaccacgtgggctaccagatgagggtccatctcccataagaagttgaagcacttcttttggggttctaggcctctggtaccctggtagctcttgagaggtgttgccttctaggtagaagggatccttatttcccatgagaccccaggacacttgctgtttgattctaagtctgctctatgccagaaattagtgagaaatccaaggcctgggttttgaggagagggctggagtggagacttcacatcccacaggcctcagatcctctgaacctggaggatctgagcctgcagtgtcctagaagctcatgggaggtgtagcatcaccattttaactcgcaggtaggtggcagggacttaagatgggctagtcctgggagctcttagcgggtgtgacaccaccattctgactcccatgtcagggcactttgtttcccagggaacaagggggttccccgtcctctcccccaggggctcgcagtccacggggccctttgctacctccgcaggcgctggcgcagcgggaagatatggaggagcggattacaacactggagaagcgctacctgagcgcccagcgggaggccacgtctctgcacgacgccaacgacaaactggagaacgagttagctagcaaggagtcgttgtatcggcaggtgggggcgcggccgggaggggcgatgggggcggtgccggggcccaagtgacccagcccgtcccctccccctgcctctccctcccccagagtgaagagaagagccgtcagctggccgagtggttggacgacgccaagcagaagctgcagcagacgctgcagaaagcggagaccttgcccgagatagaggcgcagctggcgcagcgcgtggcggcgctcaacaaggtgcggggaggactcgggtcggggccttgcgtggggaaggggtggggcctagaggaggcggggccgtgaatctggaggggtaggagcgaggtcagaaccccggatttgggggaaagggtggggcctaggggctgggaaagggacaggacttggaatggggagggcctggaggtttgcgcgggggacggatgggagcggggttctctagcctggactgaaaggaccggtggcctggaacctgagagggaaggaacaggtcctgaaaaagtggactaggcgcaggggcggggcctgactcaaaggtgcaggggaggagcctggcgctgtgggggcggagcctggcgctcagccttggaggaggtggggctgggagcctgactgatcctggaagggtaagtcacacgccatgggttccatctcctaggccgaggaacgtcatgggaattttgaggagcggcttcggcagctggaggcccagctggaagagaagaatcaagagctgcagcgggtgagggggcggaagactgcacagagggtggggcttcgaggctggggcggagcttaataaggaggctgggctgggcccgggggtggggcttagaggaagggccgtggtctgggcagggtgggcttaacaacccgccccgctctgctttgcgcaggcccggcagcgggagaagatgaacgatgaccacaataagcggctgtccgagacggtggacaagctgctgagcgagtccaacgagcgcttacagcttcacctcaaggagcgcatgggggcgctggaggagaaggtgcgccccccatacaggactgcgggacgcggaattccgggactacctcttgctggaatcctggggccccaggcctttccctcagatctgttatcggaggcctccctaaaccccggcatcctgagttgggcagccttctctgctctattgcccagaccgctttttcacctattctagacgttccaagagccgaattctggggcacccatgcctcgagtccttgacttttcccaaagcctccaaccccatgggtctccaaaccctgaaccctctgagattgcacaggacgtcgcatcccggggcttctctccccagaaacatcgttgcccctgctcccccgaaactcaccacttgtgtccatctcattcctcctgggtcccctcaggcctgtctgtgtgcactgggagctgcctgcagccccacgggcgtggcccctcaggcctcactccctcacttcacctctgtctccacagaactccctgagcgaggagatagccaacatgaagaagcttcaggatgagttgctgctaaacaaggtagggggccctgaggggacaggaggaggatgttggggcagtggttgctgaggctagggtctgcaagtctggcaggggctgttcctcctgggcggagcagattctaacccgacacctccaacaccggcccccaggagcagctcttggccgaaatggagcggatgcagatggagatcgaccagctgcgggggaggccaccatcctcctactccaggtgacagcagcccttctgccctgcccccaccatggagccccgttggccaagcgccaagctcctcccttctgatccccacttcctgtcctcctgagacttctgacccctctgtttttgttttttgtttgtttgtttgtttgttttgagacagagtctcactctgtcgcccaggctggaatgcagtggcacgattccggctcactgcaacctccacctcctgagttcaagcgattctcgtgcctcagcctcccaagtagctgggactacaggcgtgcaccaccacagccggctaatttttgtagttttagtagacacggggttttg[131 bp omitted]atttattttttctttcttttgagacagagtctcactctgctgcctgggctagagtgcagtggcatgatctcagctcactgcaacctccgcctccccggttcaagtgattctcctgcctcagcctctagagtggcagggattacaggagcccaccaccacatccagctaattttttttatttttagtagagacagggcttcaccaggttggcctggtctcaaactcctgacctcaagttatctgcccacctcagcctcccaaagtgctgggattgcaggcttgagccaccaggcctggccccttgaccttgacttcaggacccctggccctaggtctgtctctgtgacccttacctctgtgctcttttcctgaccccttggtctctgactgctttcctcatgcccacaggtctctccctggcagtgccctggagctccgttactctcaggcacccactttaccttctggtgcccacctggatccctatgtggctggcagtggtcgggcaggcaagaggggccgctggtcaggggtcaaggaggagccctccaaggtcagcagctgcctctgggtcctggactgagcagggcttgggcgggcagctgtaggaagtggaactaaatctgtggggctccgggaggaagctgggttgagaggcaggatctcttggactcatccactcaccctttcttctctccttccctgcaaccctcttgcctggatgtctcctcctgtggatgtcctgccacctggtgagaacctgagagtaatcatgggacagggaggggtgtgtagaatcccagagtaggtggggttaggtgaggaacaggagccagctgagtcatgggaatcaggggcgggggtggagtcatgggtgtgggcgtggcttggagaggatttggggagggatcaagaacagggacctgtcaagagaggaagttggaggccgggcagggtggcccatgcctgtaatcccaacacttgctggcgccgaggcaggcagatcacttgaggtcaggagttcgacagcagccttgccaaaatggcatcgctactaaaaatgcaaaaattagccgggcgtggtagcgggcgcctgtaatcccagctactcaggagactgaggcagaagaatcgttcgaacctgggaggcgtaacccgagattgcgccactgcactccagcctgggcgacagaatgagactctgtctcaagaaaaaataaataaaataaaaaaaataaagctgggctgggaaaagcatcagtgaggtcgggcaagtcaggatcatgagccaagacccagcgccaacctcggcccccagccacctaatgtccctctgtccccacacagggataggattgggagcggtctgcccctgcgggctccataccacccccattccctggggaactggacggctccgatgaggaggaggcagaggggatgtttggggccgagctgctgtcccccagtgggcaggctgacgtgcagacgctggccatcatgcttcaggagcagctggaggccatcaacaaggagatcaagtgagccctggccccgccccggcctgccctgccctgccggagctgactccacagcccttctggctctggaggcctgaaagcctgagtccgtctcctcttacaccatccacaaggaattcttccagcccaacactcactccgctgtccaggcatcccctaggatacactcagaagtcttctatgtgctacctacacatataccccccagccagtactcaccattccccaacacaccaaagcctgcatccccaaatagcccagttcctcttgatgcatcaagaatcttccattacgccatcgattttgtggtttcacataaccagtgcccagagtctcccactaccctaggaatctcaagacaacacaaggttcccaacctcaaacaccaag[136 bp omitted]ggctaacatggtgaaaacctgtctctactaaaaatgcaaaaaattagccaggcatggtggcaggcgcccgtagtcccagctactcaggaggctgaggcaggagaatggcatgaacccgggaggcggagcttgcagtgagccgagatagtgccatgcactccagcctgggctacagagcgagactccgtgtcaaaaaaaaaaaaaaaaaaaaaaaaaaaaaagtccccaacttattaagaagcccccagtgatgtaaagtctaccctgattcaccagcaatggccatattcagcaattctcttataatgtactccccatgagccttcggcaaatataccatgaccaccactttccataccaaatgagtccatgcccttcccagatcctagattggcctgagtccctgatctcacaatgctcctattatgaccttgctcttacaggccaccttgaacttgaccttttgtccatagtaatcccttcatgattttccaaaccccttgactatcatcagggccaccctgatacaaaccccaatcaccttgatagccctaatcctgcaatgacttcctgagactctcaggaccccttgactctccttgagcctggaaggccttcagaaacccaccaaagtcctctgacgtcattgcaccgtccccagaattcccattgccccaccaggcctttctggcccattgtgctcccagattccctctcccgctgtctgctgcggcccctcacccagtttcccctatttccctcctcaggctgatccaagaggagaaggagacaacagaacagagggcagaggagctggagagtcgggtgtccagctctggcttggactcgttgggccgctaccgcagcagctgctccctgcccccctccctcaccacctctacccttgccagcccctcccctcccagctctggccactcaacaccccgcctggcaccccctagccctgcccgtgagggcaccgacaaggctgtgagtgctctgaagtctccccagcctagtagggggatggggagaggtcagaggcagggctccccagtgtacagcaacaataacccctcacaccagtggttttccaaagcaacctcagctttccctaaaggttcaaactcaaagggcaaaggggaggctgagtcactgggatcttgaaccctaactttcactttagtcagatctggtctactttt[134 bp omitted]ctggccaacatggtgaaacccccacctctactaaaaatacaaaaattagcctggcctggtggcacgtgcctgtaattccagttactcgggaggctgatgcaggagaatcaattgaacccaagaggcagagtttgcagtgagttgaaattgtgccactgcactccaacctgggagacagagtgaaactgtgtctcaaaaaaaaaaaaagtttctgtgacaacatgcattggagaactacaaattagatcctcagaattgacctttgagggagacaaagagatattggccctattttactcccttaaattcagctttcctgcttccagaacctgtaactcattagctttctttgaggcctgaccaacatggtgaaaccccatctctactaaaaatacaaaattatccgtgtatggtggtgtgggcctgtagtcccagcttcttgggaggctgaggctaaagaatcacttaaacccgggaggcagaggttgcagtgagctgagatcatgccactgcactccagcctggcgacagagctagactctgtctcaaaaaaaaaaaaaaaattacccgggcatggtggcacatgcctttaatctcagctacttgggaggctgaggcaggagaatctcttgaacctgggaggcagaggttgcagtgagccgagattgtgccattgcactccagcctgggccacaagagtgaaactccatctcaaaaaaaaaaaaaaaaaaaagtttctgcaactcaccctgacttgagctagactaccttcgtatactgtgttctaaaccagggtcaccccacacacaccttagtagacatctcagttaataaggagcccccgacatgactctttgaactcaatccagcatctgtgccctctgtcctcagaatcatgtccctaaggaggaagctggagctccacgaggggaggggccggccatcccaggagacaccccaccacccactccccgctctgcccgtcttgagagaatgacccaggccttggcactgcaggcggggtccctggaagatgggggacccccacggggaaggtcagcagggacaagggatagggacagggagaagctggcttgggaagatgagaagggggtggacaaggacttgggaggagagggggcatctcagcaagcatatgctctcattctctcctgctttcccagtgagggcaccccagattctctgcacaaagcccccaagaagaagagcatcaagtcatccataggccgtctctttggcaagaaagagaagggacgaatgggacccccaggccgggacagctcttctctgggtgagtacctcactctaacccttccctcctttgttccttcctcccttcctccctccctttctttcttctttgtatgttcatttgacatccattcatgtcttcattcatttggtgatttatttagaatttggaaggaacacagcttgccaaggtaggcgggaggaggagggaaaaggaaagggcactctgggacctgcttgggtgactgggtaggtaaaggaatttatttcctttacttatttttttgttgttttttggtttttgttgttgttgttttgagatggagtttcactctgtcacccaggctggagtgcagtggcaacgatcttggctcactggaacctctacctcctgggttcaagcgattctcctgcctcggcctcttgagcagctgggactataggcgcccgccactatgcctggctaatttttttgtatttttagtagagatagggtttcctcatgttggccaggctggtcttgaactcctgacctcagatgatccacccacctcggcctcccaaagtgctgggattacagactcatttaccttttttttttttttttttttttttttttgtttggagacggagtcttgctctgtcgcccaggctggagtgcagtggtgctatctcggctcactgcaagctccgcctcccaggttcatgccattctcctgcctcagcctccccagtagctgggactacaggcgcccaccaccacgcccggctaactttttgtattttcagtagagatggggtttcaccgtgttagccaggatggtcttgatctcctgaccttgtgatctgcctgcctcagcctcccaaagtgctgggattacaggtgtgagccaccgtgcccagccacctattttttaaacagaggaagagggtggggcatcctcaaagcagggcaccttcctgtggtgtgctggagcccgctggcactggctcaggagatccgctatttcaggaattggctgacatcacactggtagcttgaaattggccatggtgggattatttacaccatggaaatgggcaaatgctacaaatcagggattcccttctgcctccccaaggagccggttgttaggcatttaccagcatacaactgccaccttaccaagggcatcccagtgcatccagccgtattttggggatgactccaattcatgggcgcttgtctgcctttatcacttcctcgatgtgccctcactcactactccctcagggcctctgcctttccggcattttcctcatcacctccagcatgaaagattctgcctcccccttgagattttccaaatttcgacccctccctgcctccagctggaacaccctcagatgagacactggccactgaccctctggggctagccaagctgacaggcccaggagacaaggaccgaaggaacaagaggaagtgagtgtgtgtgagtgtgagcgtgtgtgtgtgtatgtgaatgtgagagtgtgtgagggtgtgtgtgtgcgtgtatgtgtgtgtatgagtgtgtgtgtgtgtgagagggtgtgtgagtgtgtgtgtgcagcggtggtggtggtgaacagaaatgggaattcaatgctgggaggaggtgtccgtgatcctgaacttgcttgcctggaaacccaggagctcctagagtttttattttttctttctttttttaaaaattttttttgtattttttacatttatattatattttttgtttcttttgtttttcttattttgttctctcttttgataggggttggggggagaggatttacagattcacatgtattttttgaccttctgccgtgttttgtacattcataaaagctgcgtgtgcgtatgtgcatgtgtgtgtgtgtgtatgtgtgctgatgggggccatccacagagcagggggtctccatccctgacagcttctatcctggccccttcacccttacaggcatgaactcctggaggaggcctgccgccagggcctaccttttgctgcctgggacgggcccaccgtggtgtcctggctggaggtactggggcccagaaatgccctgactgttggtccccaacccctctgacagccccactggtaggggctgcctggtcctcctggcgcaccctgcttctagcccagaggtgggggtggccatgggcctggcaggtgaggacccaggagggctcgggcttcctgttcacctaaacagtttctttctccttctccttctgcccctgccactctggccttgcccacctgggtcatggtctcctgtcgttctctctactctctctttctggattctctgtctctatttttcggcaccattcccatctctgaccacgcttttgtcattccccatatttctcctcatgtctccgatcgccctgccgatgtctccctgtctccggcttcctgtctctccccaccctctatttctctctctctatttctttctctctctctctctttctctctccctctccctcttcccccacccgccccccgccccccgtttctctccctatttgtctccctcggactctccctcatctcgtccacgtctcttttccttgtcctgtttcttctccttgcgaactttcccacgtctctgtttcgctccccacccccttgcctttccccacctccctgttcccccatctctccgattttctcctcctctgtccctctgtcccctctgtccctctgtccctccgctgcagctgtgggtgggcatgcctgcctggtatgtggccgcctgccgggccaatgtcaagagcggtgccatcatggccaacctgtcagacacggagatccagcgcgagatcggcatcagcaacccgctgcaccgactcaagctacgcctcgccatccaggagatggtctcgctcacctcgccctcagcccccgcctcctcccgcactgtgagtgtccggcggccaattccagccttcgcttcctcagagccccgcctcttgccctcagtctagccaatcctgggcctgctcactcccctgtcccacgaccctgcttctcattggcttttacccccctcagcctcccctccactcctaacttggcctgtggtccgtccctgtggtactccaggaggggcccaggccacctccttccctgactctctccctctcctcggcatttgctgtcccactcaaatgtcaccacctctaagaagctttctttgtcagctaaacgagtttccccatcattccggcatatcagcaccttctaattttccccatagcatttattgccttctaattattttatcttttctttcctttttttttggagacagagtttcgctcttgttgtccaggctggagtgcaatggcgctatctccgctcactgcaacccctgcctcccgggttcaagccattctcctgtctcagcctcctgagtagctgggattacaggcgcccgccaccacgcccagttaatttttgtatttttagtagagacagggttttgacacgttggccagactggtcttgaactcccgacctcaggtgatccgcccgcctcggcctcccaaagtgttgagattacaggcgtgagcccctacgcctggccctcgttccaacttttgattacgagacatttcaaacatacagaaaatcatgtgtacccagttcagcgattctcaaacttttgctgtacttgctctgttgtgtgtgtggggtggaggcggggagtggggagtacaggttgagtgtcccttacttgaaatacgtgggaccagaagtgtttagaatttctgattttaaaaagttttttttgaatatttgcatataaatgaaatatcttggggatgggagccaagcctaaacatgaaattcatttatgtttcatatgcatctcatacacatgcctaaaaagaattttatacaatattttattttttatttttattttattttttcgagatgggagtcttgctttgtcgccaaggctggagtgcaatggtgcgacctcgactcactgcaacctctgcctcctgggtgcaagcaattccaatcctctgcctcaaccttccgagtagctgggattataggcgcccaccaccacgccctgctaatttttgtattcttagtagagatggggtttcacca[138 bp omitted]actgcattttgtttgtgacttgtcacatgaggtcaggtgggggattttcctcttgtggcttcgtgtcagcacgtaagtttagggccaagcactgtggctcacacctgtaattccagcattttgggaggctttggatggccgatctcttgaacccgggagttcgagaccagcctgggcaacatggcaaaaccccatctctactaaaaatacaaaaattagtcgggtgtggtggcgtatacctgtagtcctagctactcaggaggctgaggtgggaggatcctttgagcccaggaggtcgaggctgcagtgagctgtgattgtcccactgtactgcagcctgggtgacagagaaagagtgcatccaaaaaaaaaaaagtttagaattttggagcattttggattttggattttcaggttggggatgctcagagacctgtacttgaatgtaattggagaaagtcataacatcttagcccccaaaattactttagtgggtctttttcttccttgtaaacaccacatcctttatcacacctaagggcattcacattgttgttaatttctttttcttttcttttctttcttttttttttttttttgagatggagtttcactctgtcgcccaggctggagtgcagtggtgcgatcttggctcactgcaacctccgtctccctggttcaagtgattctcctgcctcagcctcctgagtagctgggattaaaggcacacgccaccatgcccagctaatttttgtatttttagtagagatagggtttcaccaacgttggccaggctggtcttgaactcctgacctcaggtgatccacccgcctctgcctcccgaagtgctagaccactctcagcctaatttttgtatttttagtagagatggggtttctccaggttggccaggctagtcttcaatctccaaaagtgatgtgcccgcctcagcctcccaaagtgctggcactacaggtgtgagccaccacgcctggccacagttgttaatttcatttactattcactctgtattcaaatttccccaacatacttaaaatatgttcattgtttctcccccactaggacgaaaagtgtctgtcgtgtcccttgccatatcccacaccctatgacggtgactggtgcctgacactcaccagaagtacataaatgtttttatccttgtatggattcctaactcgtgaggttgttgggagcagaagctcaataaatgtgaaccccccccgccatactccctaaacatttgcaccatggctgtgtctgtcccccacttctgaatcctcattctgtacctctgtgtgaggtcagcgaggtgacgtcatttgcacagggccacacagcaaaatgcatggcagggtcccaattccaacctgaatttgttcaactccaaagtcacattgcctggtacatggcaggtgccctataataagaatcattccttttctctgttactgcttgccccagaaagcaggagggacataaacgtgtggcccagggccttcaggaggacaccctccttcctctcccccacgcgaagccctctcccaccatccattaacactccctgcccctcagtccacaggaaacgtgtggatgacacacgaggagatggagtcccttacggccacgaccaagcccgtgagtgccccctgccggccgccttgggggtggcactaaccttctttgggggtgggggcggggaccgagtctgtggccatccctaagtccgctccttgcgtcctcctctgcctgccccttaactcaccccttctctcccctcttcctactaacgggtcaggagaccaaggagatcagctgggagcaggtagggggcgcggggcggggcgtgagcgcatgaacaggctgtgcacgacgcatggatgcccctcctccgagccctgcccctgccttcaccagaacatgccatcatccccatgggggggcgctgcgccaagcttggctctggactgttccattatggcttggcggtggggagggtagaggggatgcgatgtggaagcccagactgttgcatagtcagccttatgcatggaccatttcatcatcgtgggttgtgggggctctaaggggcttcaattctgtagctcaggagagactgagcagccggtgtccctatagtggagggggcgggggctacagtggactgctcagtgtaccagggccaaggaggacacactggctgtggtggtggtgaggcagccaggctgaatgagaagttggggaggaggagctacactttgttctcaagaaacaagaggcggccgggcgcagtggctcacgcctgtaattccagcactttaggaggctgaggtgggcagatcacctgaggtcaggagtttgagaccagtctggccaacatggtgaaaccctgtgtctactaaaaatacaaaaattagccgggtgcagtggctagcgtatgtaatcccagctacttgggaggctgaggcaggagaatcgcttgaacccaggaggtagaggttgcactgagccgagattgcaccattgtactccagcctgggtgatagagccagattccatctcataaaaaccaaacaaataaactaacaaaaaaacccaagaggcatgaactcactgtccacggaggaattatgtttgactgtggtcatagatcacatatttccagccagggggaggcgtggattttgtgctgatgctgaaaggagtgagggacttgggactcatctggaatattgtcctgggccagatataacattagacaagtattttcaggacattgcaagagtgatggccctttcttagtgggagagctgccttgaaagagtccattgtcctgacttgggggtttagtgacgttggactgcagtgagacagagttaaagcagtgcttccccaaatttaatgtgtagtggggtggcacacacctgtagtctcagctacttggaagactgaggcaggaggaccgcttgagcccacgaagctgaggtcaacctgggcaacatagtaagaccctgtctctaaaaaataaacaaatacagccaggcgcggtggctcatgcctgtaatcccagcacgttgggaggctgaggtgggcggatcccttgaggtcaggagtttgagaccagcctggccaacatggtgaaacgccgtctctactaaaaaatacaaaaattagccgggcgtggtggctcgtacctgtaatcccagctactcgaaggctgaggcaagagaattgcttgaacctgggatggggaggttgcagtgagacgagatcgtgccaccgcgctccagcctgggtgacatagcagactctttcagaaagagagagagagagagagagagagaaagagagaaagaaagaaatttaaaaataaatataatgtatatttcgaatcacctgagggtcttgtgaaaatgccgataccgacttcagtaggtctggagtaaggtctgagattctgcaattccagcaagtccacaggtgatggtgacgctctaggtctcaggacaactgtttgagtagccaagagtatatgctgtcatgaagggctaggagacaactctggattggtccattatcctgagcagagattggtcattgtcctaccatggggtgggaaaaaaccttggattgggaggttggactgtacccctctcatgcacagtgggaaggggccagagggcctgactcttccctcacctgcccatggccccagatcctggcatatggcgacatgaaccacgagtgggtggggaacgactggctgcccagcctggggctgccccaataccgcagctacttcatggagtcgctggtggacgctcgaatgttagatcaccttaacaagaaggagctccggggccaactcaagatggtggacagctttcacaggtgggggctgcctggccagtggggacagtccaaagggaagccccaccccagagagtctttggccaataggattggccatgggagattcccaggcttatcttggcccttttagcctgagttctcaggaaatcctgactctgtgctcctttcaccaatgagatggtccacaggaaaagttcagatcctgaaatggcttggctagttaaccctggaccccttccaggctggccagtaggaagtgcctattattgaaaatgcctcacctcctgagggggtcaacagtcaatagaacttatcagctccccaccctttccaagaagagcgcagccagtggggagggacccgtaggagcagcagtctaggggactggaaagctcatccgtgactccacttcccctgctgctcagggtgagtctacattatgggattatgtgcctgaaacggctcaactatgaccggaaggacctggagcggaggcgggaagaaagtcagacccagatccgaggtgagtagagcctaagggtccctttgggagccaggtggagggcgtggagctggatggggaggagagggggtagggggagaccggagaagcaaattggcaccataaccgtgggggtggagccagcgtggggggcgtggcccgaagagaccaaatggaggtggaggtatgggctaaactgaactctccaggccacgggaggggcacggctgagggtcccttccgtccccagacgtgatggtgtggtccaatgagcgggtcatgggttgggtgtccgggctgggcctgaaggaatttgccacgaacctcacggagagcggggtacacggggcactgctcgccctggacgagaccttcgactactccgacctggccttgctcctgcagatccccacgcagaatgcacaggtgagctgccgctgggcccggagcatgctgggcgtccccacctcgcagactgcacgctccaaccgccccctccacctcctctttccaggcccggcagcttctggagaaggaattcagcaaccttatctccttaggcacagacaggcggctggacgaggtgggcgcggcaacagctcagagggctctgctcccagcggctcctcgagaggctgagctgagggggcggggcctgactattaatggtcacggttggaggcggggccaggagaggggcggggttaaaggagaggtgagacccggagaggggtggagtcaaaggaaggggcggagtcagacaaggcaggagtccctcaccggctgtccggctcctatacctaggacagcgccaagtctttcagccgctccccatcctggcggaagatgttccgggagaaggacctccgaggcgtaactcccgactcagctgagatgttgccccccaactttcgttcggctgcagcgggagccctgggctctccggggctccctctccgcaagctgcagccagaaggtggggggctcccaaatgcgacagcccttcctcgcttccctagggtggggcatggaccacctcagtagtccgggttctggaatggcctagtcctttctcgcccacccctgaggaatggactgctccaacgttccggactcccccgtcaggatgaaatggataaatcccactcccccttcccagggcgggagtgaactcgcccaatgcgagtttgagtccttggctgcggggaagggagggaaacccatgtggagcccggcgatcgttgtgacatcgggaagggaagtccaaagggaggaatcctggagaggaacagggaggagggtgctccaggctgaaccgctgctcgctctccctccaggccagacttctgggagttcccgggcagacggcgtttcggtccggacctattcctgctagtgcaggcctccaggtgaggaccgtgctgggcgaccttgggggtgcggggcggcacggtggatcttcactgctccacgcgctgcccggcgtcatgcaggtgacctcactcggacggaagaatcttcccgaggctgggctgttccctctcctgcccggactgtggcctcgccggggagagcgggcgggggagctcgcgccgaggactggaccatctgtacagaccagcgggagtgcgcgcgcccgcctcgcacagggccggggcctggaccaaaccacatgaactggactgagagggggaagaagcggggaggaagaaatcccgccccaaacgtccgctttccttttctctactttgtaatttattgatcagtttctgttgggagacgggtgtcctttacccgcgggaagggggcggggcttccctcccgggccgcatgcggggagaggctgctccctcccctttttcctgcccagtcgcggggcccaagtcttccttcttcgtccgaaaggaggggaggggggactcgctgctacaagcctcgccccctgtgccactcagctccgccccgccgcgtccggtcgccggtcccccgggtcatctgcgggcgggttcccctctccctcccccgtgtctcgtgtccccggggcctcaccgccccccgtgctgtggccgtgtccgtgccccgggggtagggggcgcagaatggcgcttccccttctcctctggctccggggtttgcatgggagaatcctctttccacgatgccgctgggcgacgtggcgtgggggcagggggacggtgggggagccctcgcccccgactctcggtcggcctccccgccccaggcgtcactcagtgatcacgggtaaagagaactgtttcaaaaagcttccttgttgactgattttttttttgcggggggggggggggctgttcaaccaaccacctcgagccaggagtccaggcccctcatccctcaagtctaggtccaggtctctagaccctacccgcattccccgatgccctgagattcccagaccccacgtctgacaatgaggtttcggggagcacgtttattcggagaaataaatatagctcgtggaaaggggttggaaggcagggggaggtacacctgcgtcgcagtcgagcgactgggtcagggttccggcgtttccagcatgtctgccagggccctggagacgagaacgccagaagttagacagctggtgttcaaagcccaccccaggacgcttagagatcattaacctgcccatttcatggacggggaaatggagtcccagagtcatctgataactcatagcgagacaagcacttctctaaacggggcttttacacgctccccttttacacacttactgataaagggacgaggagaaatagtcaacgtagcttcctgtgggacagcagagaaaagaggcttgaggggtactgcacgagcaaaattaggcagccactcagtatagcgtgcgagattagtgctagctccacctccttttccctaattccttcttccaactgaatcccttctaccggacccctttttcgttctgggtgattccgttctccagtagccccgccccttcgattcctacttgagttggcctcgcccattaggctctaagcccgcatctcaaccctccactcatttctgtcccttggctccagcaactccacctggtgttcctcgagccaggccccggcccacgtgctcagagccttggccacgcctcccctcttagccccgccccaccagcctaccgggccaggctccgcccccaccaggattcaccacgctgggcccggcaccttcctcaggtttttccagggccccgcccatgctcacctggagcgcagaccgtttcgcagaccagcgggcagagatagcagaactgacagtgctggaggcggggacggggagagagagtgagcgtggggcgtggccgggggcggagttaggatggggccgggaccagacccggaccagaggctaggtctaggttaaggttggagtcaggatcgcttgtggagtcaaggttgcatcaggggtaaggggttgggtcagaggccaggatttagggctgggggtcctcagagggtcccggtgcatcctgaggcccagtggagccttgagtgtgaggtgaggtctcacctggcactggtcgcagtgctcacccatgttctcctcatcacagtgacagctctcacattcagtgcatcgctggggaccgggggagcctggttagatggaaactctaacgccacttgggaggtacccgcccctggcccacccctgcaccctggacgcttccccagactctaccctctttatctctaacactgagctctgtatctgccccccaaaccagcctcccctcccctcccctgcccctg[131 bp omitted]cctcggcctcctgagtagctgggattacaggtgcgtgccacca[134 bp omitted]cacacccggccctgcccctggttttctatctcagggcgaccccatgtctccctgtcagggtgggctcaggtgctctctccacccgctctctgcctattctccccctagcctatcagcccctgtgccatccctccttcccccgactctctttgccacagacccctgtctctgtccccacaccccaagatgcagcttgggtcttgtcctctccttcctggaccactgccccagcctcccagccttcagtctgtcctcacctcacatgcctgcagaaggatctcttttctttcagaactgaccctggcctgcccttgctctgagccctcccacagcaccaccccagggcccctgggacagattctggggacaccttggtgggtggatctgggctggggacatacattgcagaaggagcagtagccacacagggaccctggctggtagttcccatactcctgagcatcctgtggacctgcggggacaggagggcagcagtgacccaggctgactcggttccttcccacccacaccagcccaggccacttacctgtgtcctcaccgctttcctcctcgctggaggcacctccagcctcctctctcctgtccagtgggttggggatgatggtgaagcggggctcatcttcctccagcccctcctcctcctcctcttcctcctcgctgtggtctgggctcagtggggccccaacctcagccctctcttccctcctctcctcgtcttcttcctcctcctcctcctccttgtcttcctcttcttcctcctcctggttcaggctgaggccatgaccttcctcctcatcctcctcatcttcctggtcccggctgccatgatgggtgcctttctctccctgctctgaactttcatcgtcttcctcatgggagccggggtcctcttccttctccttttcctcctcagaatcatccttcctcaaatggcttctatccttgaccactgtgtgtcctggggggtgatggctcatctctttgatggaccctctttgaccatggccagtttcttcatcttggtggctttgcctgtggctgggggcctggtggccaagctcagcagagacctcctcatcttcctccctggggactctgtggtggtgatggtgagggacttctgttttatactcatcttggaagtcctcttcatcactcttgtggcctcgaggttggtggcttgcaacatagtggccgaactggactgtgatctcctcttcttcctcttcctcatctacaaggccatggtggacatgttggggaccctggtgccaacgttcagtggacacatcctcatcttcttcctcgtctctgtggccttggtgcctgtggtcagggacatgatggtggtgttcacctgagacagcctcaacctcttcctttctgtggtcttggtgcctgtgggcctggtgtccatactcagtggagacatcatcatcatcattgtcatcttcttcatggcttcggtgcctgtggctggggtcgcgatgatggtgtccatctgagacatcttcatcctcttcaatcccgtggccttggtgcctgtgagcctggtgtctatattcaatggagacatcatcatcatcatcatcatcatcatcatcatcatcatcatcgtcatcttcttcatggccttggtgcctgtggctggggccatgatgatggtgtccatctgagacatcctcatcctcttcactcccatggcctcggtgcctgtgggcctggtgtccatactcagtggaggcctcctcttcctcctcctcctcctcctcctcctcttctccttcatcatcttccccatcatggcctcggtgtccatgcctgaggatatgatggtgatgctcactggacacaacttcatcctcatcctcgtcttgatggctgtggctcctgtggctggggaggtggtgcctgtgctcagctgagtcttccgtgtcttcactcccgtggcctctgtgcccacgggcctgcccaccatgctctgcaaagacctcctcacctgagacaccctcatctccgactttgtggtcttgggacctgtggcctgggagtaggtgcccatattccttggagacatcttcatcctccttttcacggtctgggtggctccagaaatgatgcccattctctgtggaaacatccttgttctcatctggatggtctctagggctgtggaggtggtggcgaagctctgctgatgcctcctcggagagcccggcgactccagtgctgttgttccggtttctgaagcctagcccatcccctctgagctgctgggtcatggccggggggaggagcaggctggccaccccagcccagaggacagaagcgtgcagccatggcctatggtggcccatggggacggacaggcagcactggctccagctgcctctgcggcaatgtggacaaacgttggggtctttgtccctttggggttggtctctttttttctctgtgtctctcctttgtcctttcggtctctgtccaccttcctctggtccttgctgcctggctctggacacccctctgaggctgtctccggagccccctgacccccctctggggccctccctccccattccccagccaatagggtccttcccctcccctctctccagctaaatttactctcagccctgagttattctgggtcagtccccgcctgcctgcctcctgctcctcctcctcccagctggggaggggaccagtgaggggtctctccctggccaggagacggtggccaagggacttgactttgaactaccaacaagctcacgtttggcagctgcaaagacaaaggctagacttttagcaggtttttgggggagcctggggcacctgggggaggcagaagagacttatcagaggggagagactcctgggacggaaggactgggggttcgattgcggggtgtttccagctggaatgatacgtgctggtgagagagtgatgtcagtattgaggccctagaatggggggaaaggaacatggcccccaacacacgtgcccatgacctcctgtccctggaactcagatctgggggcagggactgggctaggccagggctataaatacagctgggaggggtagggggactcaggttacggaggccacagctgtccccatcacagagggctggcaggagacaagtggccttgcccgtctctgtgtgtcagtatttcctactcctcacccttcatgactgcccccactagggtctcctttcctgttcacgggtcctcctctctcttcaattctgtcatctgctctctcagggtccctgtccctcctccatgggattgcctctccctctcactctgggcttctgtcccactcttatcttagtgtcagtcctcccccaagtctgtgtccctctctctcccctaaatctctggcccctcctttctgagttcctgcccttcccccaattctttggtttttgcatccccctctgccccttgcctcagtcaaggtgtctcctccccatctctggcatccacctctctgggtctctgtccccactctctctcagagtctctgtccccctctgtctcagagtctctgtccacctctccctgggtctctgtccccctctctctgggtctctgtccccctctccctgggtctctgtccccctctctctgtggatctctgtccccctctctctgggtctctgttcccctctctctgtgggtctctgtccccctctctctgtggatctctgtccccctctctctgggtctctgttcccctctctctgtgggtctctgtccccctctctctctgggtctctgttcccctctctctgggtctctgtccccctctctcagggtctctgtccccctctgtctcagagtctctgtccccctctctctgggtctctgtcccctctccctgggtctctgtacccctctccgtgggtctctgtcccctctccctgggtctctgtccccccatccctgggtctctgtccccccctctctgggtctctgtccccctctctctgggtctctgtcctcctctctctctgggtctctgttcccctctctctgggtctctgtccccctctctctgggtctctgtccccgtctctctgggtctctgtccccctctctctgggtctctgtcctcctctctctctgggtctctgttcccctctctctgggtctctgtccccctctctctgggtctctgtccccgtctctctgggtctctgtccccctctctctgggtctctgtccccctctctctgggtctctgtcccctctccctgggtctctgtccccctctccgtgggtctctgtcccctctccctgggtctctgtccccccctccctgggtctctgtccccccctctctgggtctctgtccccccctctctgggtctctgtcctcctctccctgggtctctgtccccctctctctgtgggtctctgtcccactctctctgggtctctgtcccactctctctgggtctctgtcccctctccctgggtctctgtccccctctctctgtgggtctctgtccccctctctctctgtctatccctgggtccctgctgccccaccttctgattctctgtcccctaagtctttgtctccccctctttgggttaaattgtcccctccctgtctggcatcctcctttctgagtctgttccctctccgccactggcccccaactccttctgttcccatctcgcgcttgcccttggagtctcccctgtgtgtctctctccccccggcccggacctctgcaccccccaggtcgctgtccctctgtccccttatcgcggcctgggacccgccctctccccgcctcccgctttggcgtctccaagactccccgccccccagacctcgccccgccccaggctaggctggaaagtggaggatccggtttgctctgggcgggtctggaagcagagccggcggagggagcgccggggccctgggctgcaggaggttgcggcggccgcggcagcatggtggtgccggagaaggagcaggtgagcgccggaccagggtctgcgggagcgcggagctggggacctcgcctccaggctcccagagaggagggcgctggacacccagattcctgggtcagacggaggagggggatgggagggtccaggttccagggtccagggcatgggggtcgagactcctgagtctggagcgggagggcgctgggggcccggactcctgtgtccgtggggagcgcacggggtgggtggctctgtgtcccataggacagaactgggtgccctctcaccccacttccacccctacatttgttcctgtccccagagctggatccccaagatcttcaagaagaagacctgcacgacgttcatagttgactccacagatccggggtgaggagttcgcccctggactgaccccagagggtccgcggcccgctgaccccgcccgcggatggtcacgccccagccctgctccttccccattcctggactcggggaccttcccaagggcgttccttgccgacgctctccctctaggagcgtttgggtctgtgtagacacccctcattccccattcgccattctcccgctcagggtcagtgtagacgctccagggctcggttctgcttctttcctccccgatgtctcttctatgtgcttctgtctcttcgtgtcactttctgtgtctctgtctttcccttttgggtatttctgtttcattcattcattcattcattcattcattcattcatccatccatgcaagaaaccctcactcagcgctcccaaggtccctttagcctaattcaacggccctgccagggttccaatttcccctgggacacgtgctgtgtggcttcgggcaaatcatttcacctctctgggtcccgtttctcatctgggcatcaaaagaggcttgatctcctggggttattatgagaattaaacaagttaatgcttgtgatattcctggcacagcgcccagcacaggacgctgggaaatatctgcagctcccactgggaggtggcaattattaccgcgggcgggccctgtcttggtggccggggacaccaattgagctagatagggtgtgtgcgtccgcgaggagctcccgcccttcagtgacggcctctcaagcggatccaggctttctagtttttttttttttttttttttttttgagacggtgtctcgctctgtcccccaggctggagtgcagtggcgcgatctcggctcactgcaagctccgcctcccgggttcacgccgttttcctgcctcagcctcccgagtagctgggactacaggcgcccgccaccacgcccggctaattttttgtattttagtagagacggggtttcaccgtgttggccaggatgatctcgatctcctgaccttgtgatccgcccgcctcagcccctcaaagtactgggattacaggcgtgagccatcgcgctgggccaattttttgtattttttttttagtagagacggggttgcaccgtgttagccagatggtctcgatctcctgacctcatgatccgccggcctcggcctcccaaagcgctaggattacaggtgtgagccaccgcacctggcccaggctttctagttttttgttttttgtttttttgagacagagtctggctctgtcgcccaggctggagtgcagtgttgcgatatcagctcactgcaacatccacctcctgggttcaagcagttctcatgcctcagcctccctagtagctgggattacaggtgcctaccaccatgcccagctaattttttgtattttagtagagacgggatttcaccctgttgcccaggttggtcttgaactcttgatctcaggcaatgcacctgccttggctttccaaagtactgggattacaggtgtgagccaccgcgcccagccctctagttgtttttcaagacagtttttggggtgcgggaagtatccacattcctacttcagtgtgtattttgttatgactatatattagtgcagtatggcttgtaaatgatggataaataaacagatatgcgcttgttggacgtgagtgctcaaaacctttttactgataggtcagtgtggtcaagacaatttaggaaactctggtctggcctgaggaggaagaaacgcagaagataattatagtaaggcaaggggttgcagctcccaaagacgagccactgggctctgtgagagctgggaggaggtgtttgcttaagactgggaggggacacaaaatgtcactaatggtttctggagggaggaagagtggctagtgaggtgacatttgaaagtgagctggagagaggcccatggaaagcgatttggggccgggcattgtggctcacgcctgtcatcccaacaatctgggaggccgaggcgggtggatcacctaagtcaggagttcgagaccagcttggctaacatggtgcaaccctatctctactaaaaatacaaaaattaactgggcgtattggcgcatgcctgtaatcccagctactcaggaggcaggagaatcacttaaacctgggagacggaggctactatgagcagagatcacgtcactgcactccagcctgggtgacagagcaagactccatctcaaaaaaaaaaaaaaaaagaaagaaagaaagaaaaaagtgatttgaacagcatgtgcaaagtccttgctaaggaccatatggtttggcttgaatatgaatcaaagttcagggtgcagggagcactgtcatgagagaagaggctgcagaggagggcagggccagagcttgcagggtgtcagaggccaccctaaggggctgggatcttgtccttgggagctggggcatcaccgcagcagtggggttggctctgggtgtggaaaaactttctggggctgggagaggatgaacaggagctcgggaggaggctgtagagagcgtctgagcgggaggggtagtggcctgagccaggtcagggctttcgggacacagagaggagggcatggggcaaagactcagggggcaggaaggcagagcttggggcttgatgagggtgatgagggagagagggggtgccgccatcggtggatggctccgggacgtatgctctgctgactgggacacagtggggctgtccctgagatggagagctcaggagggcaagcaggtttgggaaatgtcgctgagtgcaatgtgggaatctgtgcatatgagcggcctagggggaccgaggggcatgtggggactgagattgggaaaggtctggactaatgtccagaatctgagaggtccgagttgtagctggtaattgaaactggaagtaggtaagacgtcacagggaaaacaacgtgtaaagtcaggggagttgcaaactggcaattctatagccaattgtgtgcgtgtgtttgtgtgtgtgtgtgtttagaagagcatttaaaaatatctgtcttctgtctctctctcttttttttttttttttttttttgagacagggtcttgctctgttgtccaggctggagtggcacgatcatggttcactgcagccttgacctgctgggctcaagcgatcctcccacatgagcctccggagtagctgggaccacaggcatgcaccaccatgcctggctaattttaaaattttttgtagaaaccgggtctccctttgataccagaccaggctggtatccaactcctggactcaagtgagcctcccacctcactctgcctgccaaagtgctggaattacaggcgagagccaccatacccggctacctcttttttttttttgagacggagtctcgctctatcacccaggctggagtgcagtagtgcgatctcggctcacttcaacctctgcctcctgggttcaagcgattctcctgcctcagccccccgagtagctgggattacaggcacccaccatcacgcctggctaatttttgtacttttagtagagacaaggtttcaccatgttggccaggctgatctcgaactcctgacctcaagtgatctgcccacctgggcctcccaacgtgctgggattacaggtgtgagccactgctcctggccctggctacttctttctgttgagttacttgactggcctctgcacacattgggtttgagaatcatgtagggaaggcttgcactgggaacacctacactcaagggaggtgaaaagcaagagaaagccacaaacaagtcaggcatgaagcagccggggcggggaggaaggccagaggggcaggggtatcctgccaaggagagggtttccagaatgagagcctttcagctgtagccagggccacttgtgatacagtcagatgaaacctgaataagggccgttgtatatggagccaggcaggaaattgatgatttttatcaagaacaatttcaggccaggcacagtgactcacagctgtaatcccagcagtttgagaggccgaggtgggctgatcacttgaggtcaggagtttgagaccagcctggccaatgtggtaaaaccccatctctactaaaaatacaaaaactagccaggtactgtggcacatgcctgtaatcccagctactcaggatgctgaggcacgagagtcgcttgagcccaggtggcagaggttgcagtgagctgagatcgtaccactgcattctagcctgggagacagagcgagactccatctcaaaacaaaacaaaacaaacaaacaaacaaaaaaacaatttatttcagtttctgtggctccaccgaggaaagagtgtaggaggcaagctgtgcagaaggaatggctcctagcactgaatgtcagaattttccacgattttggaaacgttctatgtctacatccaatatggcagtcctggccacagggggctactgggc[136 bp omitted]ctgcctcagcctcccgagtagctgggactacaggcacccgccaccatgccaagctgatttttgtatttttagtagaaacagggtttcaccatgttggccaggctggtctcaaagtcctgacctcaggtgatccgcccaccttggcctccctaagttctgggattacaggcatgaaccactgcacttgacctgaattttttatttgatttaattttaacttattagaacagaaagagctccatggctacaaagaacccatgcagctatcacattggacagtacaagctccagactattccgtgaagagcttttattttattattattatttttttttttttttgaggcagagtctcattctgttgcccaggctggagtgcagtggcacaatctctgctcatcacaacctccgtctcccaggttcaagtgattctcctgcctcagcctcctgagtagctgggactacaggcgcgtaccaccatgcccggctaatttttgtatttttagtagagataaggtttcactatgttggccaggctggtctcgaactcctgacctcatgatccgcccgccttggcctcccaaagtgctgggattacagtcatgagccaccatgcccggccttatttcttatttttagtgacatggtcttgctctgttgcctagcctgaactgcagtggtgtgatcatggcttattgcagccttgaactcctgagctcaagtgatcctcctgctacagcctcctgagtagctggaaccacaggcgtgcaccaccacacctggctaattaaaacaattttttttgtagggatggggtctcgctctattgcccaggctgttctcaaactcctgggctcaagcagtccttctgccttgacctcccaaagtgcttggattgtgcccagccgtccttgaagttttgctcagaagagcaaactttctgggaagtagctgcaggtgttggaagtagctgcaggggaactaggggattcaaggatggagctgaaatgggtgaacggacaaagtcggtaaactgaggcatgccagggccctggaggtagactcaggaatgaagaagacactttattgtagttctcactgtgccaggacctggcctaagtgtgtttggttcatcccatgtgtggatcagttagccgttcttttagtgtctttacggcttttgccaaatccttgtagcacctctgctatcccttctgtaaaattgctcttaaatctgctcactaggtttgtgtaaatacaggtctcccctgatatctgaactcctggaatctggaacaaagaatttagatacatttttctccttctttcttcctttctctttcttttcttttcttttctctctctctttctttctttctctctttctctttctttctctctctttccctccctccctccctcccttccttccttccttcctttccttcctccctctctgtctctctccctccctccttcctttctttccttagttttttttttttttttttttttttttttttttttgagatggagtttcgctcttgtctcccaggctggagtacaatagtgtgatggctcactgcaacttctgcctcctgggttcaaccaattctcctgcctcagccttctgagtagctgggattacaggcacccgccaccacgaccagctaatttttgtattttttttagtacagacagtgtttcaccatgttggccagtctggtctcaaactcttgacctcagatgatccacccgcctcagcctcccaaagtgctgggattacaggcatgagccactgcgcccggcctcttgcttgcttgcttgcttgcttgcttgcttgcttgcttgcttttctttccttcttttcttttttttgaacagggtctcactctgttgcccaggttggagtgcagtggcgtggtcacagctctctgcatcactgcagccttgatctcccaggctgaagtgatcctcctgcctcagcctcctaagcacatgctgccacacctggctaattttattttattttattttatttatttatttatttttagagacagggtctgactatattgcacagctggtctcgaactcctgggttcaggtgatcctctggccccagcctcccaaagtgctaggattacaggcatgagccatcatacccgaccctacattttcaaatgaatttctcattctccaaacccctgttacttactcaggtgccaatcacctttagaaagcaagagagacttgtgcatttctttaggtgggggaaagttttatatgtggaaactttccaaatggaaacctgttccatttggcacagagaggaagaaacaagccacacagaagccaaagacaatgaaaagcaaacaaaggtgtttccctactcgctagatggctgttgccagctccattttttgagcccgaggcctgcttttcttgttcaaaagagtagcaaagggttaggcattcaaaaatattctagcacccggctgagcctctctccttgacagtcgtcaggagaactgaaaaaggaatgactttctcactgcgttattcaaggttattttaagctccgtgtgaagttcgtgtcgcgttgcctctggctgggactggtatgcgagcctcatttcaggaaacacggcgttctttccctggctcctcatagctccgtggagtaggccgcgctattattgtcttttcattagaggaggaaatttaggctcagagaggtgaagccgctcgcccaaagtcacacagccgcgtcagccccgagcatgcgggctctccctgagttacccgctggatgttctttctcgtgttgaacgtcatgtgtttggatgggggcacagggcacagcaaggatacccccagtggccctctgccttcccacttgaggctcctcaggtgacagtgacctgcttcttcctgctcaggctttctggactcactggcttccttcccgtggggaaaggggaccgtcctcggctccagtctctccccgaggccgtcagagccagggccaggggcagcgtggactctgcctgcctctgtgggtgtggactcagtgtcgacagccccctctacaggagcatgaacacgctgacagggtgctggggtcggggggcagccctgggttcacgctccgccctcgcacccccagagggaccttgtgccagtgtgggcgcccccggaccgcccaccccgcagtggccatggaggatgccttcggggcagccgtggtgaccgtgtgggacagcgatgcacacaccacggagaagcccaccgatgcctacggagagctggacttcacgggggccggccgcaagcacagcaatgtgaggcgggcctctgtgggcggggcccgggcaccagggggctgcatgctcggggctccagagtggagccgggacgcccgccctgaaccctggcccctccgcccatccctgtcttggctctctttgtcccctccgccccacctatcttctctctgagggggtcccgttctctctgcgtctctttgtctctgtctccctctgtctccgtgtccctctctctctgggtctctgtccccctctctctctgggtctctgtccccctctctctctgggtctctgtccccctctctctctgggtctctgtccccctctctctctgggtctctgtccccctctctctctgggtctctgtccccctctctctctgggtctctgtccccctctctctctgggtctctgtccccctctctctctgggtctctgtccccgtctctccgggtctctgtttccccttttctgtgggtcactgtcctcatctctttgggtctgtgtttccgcttttctctgtgtctctgtccccgtctctctgggtctctgtctctgtctctctgggtctctgtctctgtctctctgggcctctgtttccccttttctctgtgtctctgtccccgtctctctgggtctctgtcttcctctctctgggtctgtttccccctctctctgggtctctgtccccatctctctgggtctctgtctgtttctccgggtctccgtccctgtctctccgggtctctgtttccccttttctctgggtctctgtccttgtctctctgggtctctgtccctgtttctccgggtctctgtccccgtctctccgggtctctgtttcccctttactctgggtttctgtccccatctctctgggtctctgtccctctctctctgggtctctgtccctctctctctgggtctctgtccctctctctctgggtctctgtcgccatctctctgggtctctgtcccatgtctctgggtctctgtccctctctctctgggtctctgtccctctctctctgggtctctgtccctctctctctgggtctctgtccctctctctctgggtctctgtccccgtctctccgggtctctgtttcccctttactctgggtttctgtccccatctctctgggtctctgtccctctctctctgggtctctgtccccgtctctccgggtctctgtttcccctttactctgggtttctgtccccatctctctgggtctctgtccctctctctctgggtctctgtcgccatctctctgggtctctgtccctctctctctgggtctctgtccctctctctctgggtctttgtccccgtctctctgggtctctgtccccgtctctctgggtctctgtccctctctctctgggtctctgtcccatctctctgggtctctgtcccatgtctctgggtctctgtccctctctctctgggtctctgtcccatgtctctgggtctctgtccctctctctctgggtctctgtccccatctctctgggtctctgtccctctctctctgggtctctgtccctctctctctgggtctctgtccccatctctctgggtctctgtccctctctctctgggtctctgtccccgtctctctgggtctctgtccccgtctctctgggtctctgtccccgtctctctgggtctctgtccccctccctgtgtgccccgctcccatgtgtccacagttcctccggctctctgaccgaacggatccagctgcagtttatagtctggtcacacgcacatggggcttccgtgccccgaacctggtggtgtcagtgctggggggatcggggggccccgtcctccagacctggctgcaggacctgctgcgtcgtgggctggtgcgggctgcccagagcacaggtgaccgagggtgggtgggggctgtctcctgggcctcggcctgcctgccatctcccccacgactgtgggtggcctcccccgccgcccagtgtgtgtgtgtgtctctgtcttattctttgtttctctccccctgcctctgcatgttcctcggcgtctgtgtaggagcctggattgtcactgggggtctgcacacgggcatcggccggcatgttggtgtggctgtacgggaccatcagatggccagcactgggggcaccaaggtggtggccatgggtgtggccccctggggtgtggtccggaatagagacaccctcatcaaccccaaggtgtgacccagggacttggaaaagggggctggaggcctggactcctgggtctgagggaggaggaggggctcgtgtttgtccttctggccccgatgaggagacgccctggtctggccatttttcccctagggctcgttccctgcgaggtaccggtggcgcggtgacccggaggacggggtccagtttcccctggactacaactactcggccttcttcctggtggacgacggcacacacggctgcctggggggcgagaaccgcttccgcttgcgcctggagtcctacatctcacagcagaagacgggcgtgggaggtgagtggtcgaacccatgacccacaacccacgacccacaacctgcaaccccagcgctcaggatcccagtagtttggtctggtcgagatttggggaattacctatggttaagtgtctttccccgtcattattcatggttttaaaaacttctgtctgagagtgagttagctcacatcagtaatcccaacactttgggaggccgaggtaggaggattgcttgaggccagtaattcaagaccagcctgggtaacagagcaagaccttgtctctaccaataataataataataataataataaagaataaaaaataaattagccaggtgtggtgtcgtgtgcctgtaatcccagctacttgggaggctaaggtgagagaactgcttgaacccgggaggtggaggttgcagtgagccgagatcaagccactgcactccagcctgggcgacaaagcaatactccatctcaaacaaacaaacagactttattttgaaatttctcatacatacagaaaaatgcacgaaggtggacagcttgatgcatttttttctttttttgagacggagttttgccctgttgcccaggctggagtgcagtggcgcgatctcggctcactgcagcctctgcctcctgggttcaagcaattctcctgcctcagcctcctgcctcagactcctgagtagctgggattacaggcacgtgccatcacacccggctaatttttgtatttttagtagacggggtttcaccgtgttagccaggatggtcttgatctcctgaccttgtgatctgcctgctttggcctcccgaagtgctgggattacaggtgtgagccaccgcgcccggcctaatgtttgtatttttagtagagatgaggtttcaccttgttggctaggctgttttcgaacttctgacctcaagtgattcgcccacctcagcctcccaaagtgctaggattacagacgtgagccactgcacctggctccggctaatttttaaagttttttgtagagacagggttttgccatgcagcccaggtggcctcaaactcgtggtcgaaagtggtccacctgcctcagcctcccaaagtgctgggattacggtcgtgagccactgcgcccagccagccaatatcttataattttatcaaaacatgaacaagatacattactaggtttgaggaaagtttttgatttttgtgtatttttcttgtatcaatcctcttaccaaattttcttattgatctttatttttatttttggtggggttttccaattttctgggaatacaagccatgttttcttcaaataggtacttttgtcccttccagctttacaaaaaaccaaaaaccaaaaaatcaattttcacttcagtgatttcatttttttgcattattgagttagctcaaaactccaggatgaatacagtgttagtggtaatgtggtctagtttctaatttatttatttatttttttgagagggagtcctgctctgtgcacaggctggagtgcagtggcgtgatctcagctcactgcaacttctgcctcctaggttcaagcgtttttcctgcctcagcctcccgagtagctgggactataggcacgagccaccactcccagctaatttttgtatttttggtaga[144 bp omitted]atatagtgctatctttatggtgcaattggattttggtaaatatctatattgtggttagatagccctttctattcccatttcctttactttctatttgaactttcactccctctggctcctggatggttaatcaatgacaggattgactcatacaagaaacacctgcctcattcagggactcaggagtctaggtcctcagccccctcctccctggggaagttaagcattactgtcttcaaaatctagctccctcctgaagtgtccaaagacatgacaattctggccaggcgcgctggctcacagctgtaatcccagcactttgggaggccaaggtgggaggatcccttgagtccaggaattcgagaccagcctgggcaagatggcaagacccctgtctctaccaaaaattaaaaagttagctgggcacggtggtgtgtgcctgtggtcccagctacttagaaggctaaagtaggaggatcaagatgtagtgaggtgtgatcatgcccctgcactctatcctgggcgatagagtgacaccctgtttcagaaattaggctgatgcggtggctcatgcctataatcccagcactttgggagtccaagttgggaggattgcttgaggccaggagttcgagaccaccctggccaacatagcaagacccccatttctaaaataaatacataattaagtaaaaaaagaaatgacaattccaatgagcctctgaacagaagattaggacaaggctgatgtttgccgactcctgggaaatgcggttttctcctatctccagcaaaggctgatgggaggtaatcaagcccccttctcttcttgcctcagggactggaattgacatccctgtcctgctcctcctgattgatggtgatgagaagatgttgacggtataggggcccggatgcccggatctaagggggaaggagggttgggggccaggactcctgggtcctgagtcttagggagggtctgggggtctgactccgggtagggtgaatatcctgccttttctgacgtgatgaataaagaatgcctttatcctgtagcgaatagagaacgccacccaggctcagctcccatgtctcctcgtggctggctcagggggagctgcggactgcctggcggagaccctggaagacactctggccccagggagtgggggagccaggcaaggcgaagcccgagatcgaatcaggcgtttctttcccaaaggggaccttgaggtcctgcaggcccaggtatgacactgggggcccaactctggatcctgagatgggagggaactggggacttgggctcctgggtctgagggaggaggggctgggggcctggacttccaggttccgggagaagagggtgctgggcatatagactattaggtcctggaggggaatggcctcctccatccctttggacagggcccaacaggagttggggatggaggcgggctagggatgcagaactggctattccacaggtggagaggattatgacccggaaggagctcctgacagtctattcttctgaggatgggtctgaggaattcgagaccatagttttgaaggcccttgtgaagggtaaaagttgtaccctccagtcttccccctctctcagttcaaccttagacacctttcctggcctgggcacttcatccaccctctctaatccaaggcccatgccccctttacccctcttaatatttttcccctttggggctttgcatggtgctatttgggcagttttcccagatgctttcattatgttccagcatctgctttcctctgttggatccatccatccattctttcatctttccatccatccacatgtacagatcgatctttccatctctttacctaccatccttccagtcatccctcattctttcatccatccatcctttcacctgtccatccacacatccactgacaattcctgagaattccatccgctcattcctccatccgtcttctcacctgtccatccacacatccactgacaattccattcagtcattcttccatccatccatcttctcacctgtccatccatgcatccactgacaattcctgagaatgccatctgctcattcttccatccatccatcttctcacctgtccatctacacatccaccgaaaattcctgagaattccatccactcattcctccatccatccatcttctcacctgtccatccacacatccactgacaattccattcactcattcttccatccatccatcttctcacctgtccatccacacatccactgacaattcctgagaatgccatccgctcattcctccatccgtcttctcacctgtccatccacacatccactgacaattcctgagaattccatccgctcattcctccatccgtcttctcacctgtccatccacacatccactgacaattccatccacttattgttccatccatccatcttctcacctgtccatccacacatccactgaaaattccattcactcattcttccatccatccatcttctcacctgtccatccacacatccactgacaattccattcacttattcttccatccatccatcttctcacctgtccatccatgcatccactgacaattcctgagaatgccatctgctcattcttctatccatccatcttctcacctgtccatctgcacatccactgaaaattcctgagaattccatctactcattcctccatccatccatcttctcacctgtccatccacacatccactgacaattcctgagaattccatccgctcattcctccatccatccatcttctcacctgtccatccacacatccactgacaattccattcactcattcctccatccacccatcttccatccatttacccatctacccatccatcttttcattcatccatccaactgttcttccatctatccatccacccacccattcttccttccctacatgcttccaatatacatgaagcactctggctagacatgaaccaaagcactgtctcccagtgaggaagtccagatatttcactagaaatggcagcttggaggacggaatgatgaaaaccaaggcgggggagcataatgcacacctgggagaggctggggagggtcttatttatttattcacttattgagacagggtcttgctctgtaggccaagctggagtatagtggtgtgatcacggctcagtgcagcctcaacctcccaggctcaagtgatcctcccaccccagccttccaagtagctgggaacatacccgcccaccactacacctggtaaattaaacaaaaaaaaaattttttttttgtacagacgaggtcttgctctgttgcccatgctggtcatgaactcctggcctcaactgatcctcctgcctcagtctcccaaagtgctgggattacaggcatgagccaccatgccagcctcctttatttagtcaacaaatacaatcctaggctccagagactaaagccaacccatttcctgctctcaaagaccccagatcccactaggattgtttggatacaaccttaggtaaaatttaagacagaagcacaggcaagaatcactgtcgttagaaggaaaacttcaaggaaaagttgtgtgtgtgtgtgtgtgtgtattttgagacagagtcttgctctgtcgcccaggctggagtgcagtggtgcgagcttggctcactgcaacctccgcctcccgggttcaagcgattctcctgcctcaccctcctgagtagccgggattacaggcacgtgccatcatgcccggctgatttttgtatttttagtagagacggtgttt[131 bp omitted]gccaggcacagtggctcacacgtgtaatttcagcactttgggaggctgaggagggaagatcgcttgagcccaggagtttgagaccagcctgggcagcatggtgaaatgccacctctataaaaaatacaaataataagttggggagggtggcgcatacctgtaatcccagctacttgggtggctgaggcaggggaatcgctcgaacctaggaggcagattgtgccactgcactccagcctgggtgatagggcaagactctgtctcaaaaaaaaaaaaaaaaaacctaaataaataaaccaaataaactggaccttgataagtcagtagaatttggatttagtaagctaacgagtgggacagataagtattcaggaagattcccagggctctgtgtggggagggtcatttttggtgtcagaagaacttttttctttttttttttgagataaggcctcgctctgttgctcaggctggagtgcagtggtgtgatcttgacccactacagtcttgacctcctgggctcaagagatcctctcacctcagccccacaagtagctgggaccacaggcatgtgccatcatgcctggctttttttttttttttttttttttttgagacggagtttcgctcttgttgtccaggctggagtgcaatagtgccatctcagctcactgcaacctccgcctcccgggctcaagtgattctcctgcctcagcctcccaagtagctgggattacaggcatgcgccaccacacctggctaattttgtagttttagtagagatggggt[136 bp omitted]cactatgttgcccaggctggtctcgaactcctgggctaaagctatctgcccatctcggcctcccaacgtgctgggattacaggcgtgagccattgtgcttaggccagaagaattttacgggggaaatacacactaagatagaaactccccagatacacggtggcaatatatacagcattctacctcagctccccacccatgtttgtggtg[164 bp omitted]gcctcccgagtagttgggctctctatttttagta[153 bp omitted]caggctggagtgcaatggcgccatctcagctcactgcaacctcctcctcccaggtttaagcgattctcctgcctcagcctcctgagtagctgggattacaggtgcccacaaccgcacccggctaatttttgtatttttagtacagacagggtttcgccatgttggccaggctggttttgaactcctgacctcaggtgatccacccgcctcggcctcccaaagtacttggattacaggtgtgagccaccgcgcccggccttaattcatttttaggtattttttgagacagtctcactctgttgtccaggctggagtgcagtgggacaatcatagctcactgcagccttgagatcctgggctcaagtgattctctcgcatcagcctctgagtagctgtgcgccaccacaccaggctaatttatttttaatttttttatagggatagggtctccctatgttgcctgggctggtcttgaactcttgggctgaagagatcctcctgccttgacctcccaaagtgctaggtatagtacaggctgtggtagggtagaaagagcaagttatttttgctttggaatcagacaaaactgaatttaaataccagcttgggccgggtacagtggctcacgcctataatcccaacattttgggaggctgaggtaggatcacttgaggtcaggagttcgagatcagcctggccaccatggcaaaaccctgtctctactgaaaatacaaaaattagctggcgtggtggcgggtgcctgtaatcccaactagttgggaggctgaggca[148 bp omitted]cttgaggaagcagcttcccctctctgagccccagtttctctctgtggaaagtggagataatatcttacaggagtgttataagcctccatggcaaggtatgagttgtgcccggtcccggtgggggcccaataagagggatctcctcttaatatgattccatttcctctgggggtacatccttcaatataaggtaactctcagtgggcaaatctgattcactctgcggaagttaactcagcagcctcctgggagaaaatacggcagctctgcaagatgtggtttgagggggtggtgttgtaagcccagcaggagtggaagtgatcacagtccactgggggaactggagatggctgataggcttggggatagcagagttgaatggatggaatttcagcaagaaagaag[134 bp omitted]agcctcccgagaagctgggactacaggcacctgccactatgcctggctaatgtttgtatttttagtagagatggggtt[132 bp omitted]gcaggcccagtgctgggcagttggtgtactcttttgcccttcatctcccttccctgcctgcaaggattatcaccccattttgcagatgaagagactgaggctcagagagaggaaaaatggcttgcccagggtcatccagctagtagcaggggtcaggcttttcatgtgagtctgtataattctcaagcccattgcaaggggcatgtttggagagaggtcagaggctcgcagggttggtatgtatcattggcatgaagggagtgttggagacaaggccagtgaggcaggtagggccaaaccacccaggacctcaaatgccaggcagaggggctaaggctgtccttgagaggcagcagaggaccagggtccgttatgtggataaaaaagactctctggccaagcgtgaaggctcatgcctattatcacagcaccttggaagactaaggaaggaggttcgcttgagcccaggagtttgagaccagcctgggcagcatagtgagaccccatgtctataaaaaattagctgggtatggtactgtgcgcctgtagtcccagctactcgggaggctgaggcaggaggatcgcttgagcctgggaggtctcaaagctgaagtgagctgtgatggcgccactgcactccagactgggtgacagacgaagaccctgtctcaaaaaacaaaaacagactctctgggagtgggtgggggcagagtggagaggagagaagagactgcagtgatggtgtttgggggtgccgaagcttgagctatagctggggccaggaggacagtcggggaggctcagcagagagtcaggaggctggacgtgggacatgaagcttgggggctgatggcctgtgagatgggaggagcaggaagggacaaggacagtacctgcgggtctgccttattgattgggtggacagaggggccattcctgagatgaggacgtagggaagatgggtttgagggctagatgctgagttgagtatggaacacggtgagtctgaagggacaaggtggggccagggtcgagtgcccaggtgacaaatggtgccagattaaggcggaatataaagcaaggtattattattattattatttttatttttttattttttttgagatggagtcttgctctgtcgtccaggctggagtgcagtggcacgatcttggctcactacaagctccacctcccaggttcatgccatcctcctgcctcagcctcctgagtagctggcactacaggcgcccgccaccatgcccggctaattttttgtatatttagtagagatggggtttcactgtgttaaccagggtggtctcgatctcttgacctcatgatccacccatctcggcctcccaaagtgctgggattacaggtgtgagccactgtgcccggcctattattattatttttgcaacagagtttcgctctgttgcccaggctggagtgcaatggcgtgatcttggctcactgcaacctccacctcccgggttcaagcgattttcctgcctcagcctcccaagtagctgggattacaggcatgagccaccacgcccagctaattttgtatttttagcagagacgaggtttctccatgttggtcaggctggtctcgaactcctgacctcaggtgattcgcccacctcggcctcccaaggtgttgggattacaggcatgagccacagcatccagcctattattattatttgagacggagtctccctttctcacccaggctggaatgcagtgacgtgatctcggctcactgcaacctccacctcccgggttcaagcgattctcctgctcagcctcccaagtagctgggactacagacgcatgccaccatgcccagctaattttttgtattttagtagagatggggtttcaccgt[137 bp omitted]ttgaaactgtggggaaagtaggagagcttcatagaatcgtagaaagtcgtggaaaagtccgctctgaatggacgtctgggttttgaaagagcacagaaagccatgaggtcctagacatgttactgcctttctgggcctctgtttcctcaagcacagccttggaggttacactggccaagctgtagtgtcgccacagcgtggaacttcttcccacagttactgtaattgattacagtgctatgaagggggtgccactatttcccatttaatagatgaggaaactgaggctcccaaggttcaatggcttgcctgaagtcactcagttggtactggtggaccggggactggaacccacgtctgcctgccccagagcctattgctcacctccactacatgagattatctctttctgtggtaccagtttttggagcaaccaaaatgagatgaatttgttttggagatagatatggagcaagtggaggcagaaggaaacctaactccatgtcacgacaaatgcccttcaggacttttcatgcccctgttgactgcacatgtttggatccactacatagctggatcaaatttttaagggtttctggttctctcttgctgtttcagtgacctccagggtctctcggagtccctctcctgttctcattttctgctgttgtcacctctttcccttcacaatataccccaagtttcagaaatcagagtgactcacgtttgtcatcatctgctgtgtgtgtgtgtgtgtgtgtgtgtgtgtgtgtgtgtgtgtgtgtgtgttgcacccgggcctttgcttctgctgtgcctgctgctttgaacgcccttttcgcaccttaggggcatacctcccagtcctggtggtctttcaaagtgctacctcaacacccattctctgggagctctcttgggccactctatacctctgtgaccatatcctcctctgggccctaatcatattatatgcctatagatgcctccttagacacccctccaccctgccttccattatggcctgtccagccttccctttaatcgcccatccatctctgattgtccgtctgccccatcttgtttcctctctccccatccatccgtctgtccatctatccatctatccaccctgtacatccatctatccatccatccgttcattcatccatctctttatcctttcatccatccatttatccatcccatccatccatccttctatctgtccatccatccatcctaatcatattatatgcctacctctgagggcaccaagcaccctgagggtagttatgtgttggggggacatatttcccccaatagaaccagcttcttcagggtaggaactgtatctgatttctctctccatccctcccactgcttggtccataacatacctcaataaatattaaatgaataagtgattccttttgtttcttcttgggggctgtaaaccagtggtctgtgctctggccctgagccaaatgaccttatgcctatgatagcctgactgctttaagacccccacactctgcccagtagcaacccctttatgcagagtttaaaagtcagacatgcaaaatagaggcaaaatagacattcagcagatgtccctcctcccctgacttcttgtcccctctccctctaatccttccagcctgtgggagctcggaggcctcagcctacctggatgagctgcgtttggctgtggcttggaaccgcgtggacattgcccagagtgaactctttcggggggacatccaatggcgggtgaggggtcagggcctgggggttgggcatactgacaaagggactgtgctgtcctccctctctgccttctttttttttttttttttttttgacggagtctcactctgtcacccagcctggagtgcagaggtgtgatcccagctcactgcaagctccgccacctgggttcacgccattctcctgcctc[134 bp omitted]caggctcccaaagtgctggggttacaggcatgagccaccgcacccggcctctctgccttcttagacgcccctcaaccctgccttccattatggcctgtccagccttcccttaattgtccatccatctctgtccatctgccccatcttgtttcctctctccccacccatccatctgtctatccatccatccaccctgtacctccatctatccattcatccattcattcatccatctacttatccatccatccatccatttgtccatccatccatttatccatccatccatccatccatccatccatccatctgtccatccatccatccatccatccatccatccatctgtccattcatccatccatccattcatctgtccatccatccatctacctatccattcatccatacatccatccatctacctatccattcatccatccatccatccatctatccatccatccatctgtccatccattcatctgtccatccatccatctacctatccgttcatccatccatccctctgtccatccatccatccctctgtccatccatccatccctctgtccatccatccatccatccatccatccatccatccatctgcccatccatccatctgtccatccatccatctacctatccattcatccatccatccacccatccatccatccatccatccatccatccatccatccatccatccatccgtccctcatacccttgcccatctcttgtccttaacctttgagctaatctcttcccctattcatcccaccctgccagtccttccatctcgaagcttccctcatggacgccctgctgaatgaccggcctgagttcgtgcgcttgctcatttcccacggcctcagcctgggccacttcctgaccccgatgcgcctggcccaactctacagcgcggcgccctccaactcgctcatccgcaaccttttggaccaggcgtcccacagcgcaggcaccaaagccccagccctaaaagggggagctgcggagctccggccccctgacgtggggcatgtgctgaggatgctgctggggaagatgtgcgcgccgaggtacccctccgggggcgcctgggaccctcacccaggccagggcttcggggagagcgtaaggaccgggcaaagctggggggcccccccgcgcgggaaggacctgggggcgggattacatcagggatggggcgtggccaaaccagaggcagggctggtggtggccagtgttggggaggggctggtcctcaccacccctccttttgctggcagatgtatctgctctcggacaaggccacctcgccgctctcgctggatgctggcctcgggcaggccccctggagcgacctgcttctttgggcactgttgctgaacagggcacagatggccatgtacttctgggagatggtgagtgctgacttggcgctcctgcatccctgtcctttaggccactggatgccagtgttcccgaaacaattaccatacaattccccgacccctgacgtcacctgacaggcgccccatcctccgtcgctgatatatgcctccaactg[137 bp omitted]aagtaattctcctgcctcagcctccggagtagctgggattacaggcacctgcccccacgcctggctaatttttgttttgttttgttttgttttagtagagatggggtttcaccatgttggccaggctggactcctgacctcaagtgatccacccgcctcggcttcccaaaatgctgggattacaggcatgtgccaccgtgcctggccaagattctctctttgttttggcctttgataatatatctcagtgtggatctctgtgaatttctttttctttttcttttttttttttttttgagatggagtcctgctctgttgcccaggctggagtgcagtggcatgatctcggctcactgcaagctccaccttctgggttcatgccattctcctgcctcagcctcccgagtagctgggactacaggcgcccgccaccacgcccagctaattttttgtatttttagtagagatggggtttcaccgtggtcttgatctcctgaccttgtgatctgtctgccttggcctcccgaagtgctgggattacaggcgtgagccactgtgcttggcctgtgaatttcttttacttggagttccttgagcttcctggatgtgtagacttttgtctttcatcacattttggaagtttttaggacattatatcttcaaatattatttctttccctttctgtctctcttttccttttggactctcattatgtatgtattaatattctgtatggtgtctcgcaagtcccttaggctctgcttattttccttcatttgtttttcttttttctcctcaggctggataatctcaatgtacttagcttcaaattcactgatctttattttgccttttttatgaatctactgttgagtccctctagtggtttttatatttcagttattgt[142 bp omitted]tgcctcctgggttcacgccattctcctgcctccacgccattctcctgcctcagcctcccaagtagctgggactacaggtgcccgccaccacgcccagctaatttttttgtatttttttagagacagggttt[141 bp omitted]aactttatttttgattacagtaccattctcaatctcttctacaaaaagcagaaaaaaaagcagccacttcactcaagacctatatacagataagatgttttctgtgtttttttcttttttttttaatttttatttttaaaaaaataaattcagtgttcacatttctataaagaattaacccagtttcaggaaaccctgcctctatctctgtattcttattctctaggtggtgagacatctttttcctggctccctttagttcttttttcatgatttcctttagctcttcgagcatatttaagacaatttatttaaagcctttgctagtaagttcagtgtctgagtttcctcagggatagtttctattcatttatttttttcctactcatttctattcatttcatttcttttcttttatttatttatttgttgttcttgttgttgttgttgagacagagtctcattctgtcactcagactggactgcagtggtttgaccaaagttcactgcaaccttgacttcttggactcaagcaatcctcccacctcagcctcctgagtagttgggtctaccagccacatgccaagctaattttaaaaaatttgcagagatggggtcttactatgttgcccaggttggtcttgaattcttgggctcaagcaatcctcctgcctgggcctcccaaagtgctgggattacaggtgtgagccaccatgcctggtctctattaatttcttttttttccagtatatgaaccatattgtcttgtttctttgcatgcctcataatttttggttgaaaagtggaacattttgaatatgataatgtggcaactctggaaatcagcttatgccctccctccagggtttgttgtggctgctgctcattgtgggtcattgttgtttgtttagtgacttttcttttttctttttcttttttttggggggaggggggatggagtctcactctgtggcccaggctagagtacagtggtgcaatctcggctcactgcaagctccacctcccaggtttaagtgattctcctgcctcagcctcccaagtagctgggattacaggtgtgtgccaccacacccagctaatttttgtatttttcatagagacggggtttcaccatgttagccaggctggtctcaaactcctgacctcaggtgatccacccaccttggcctcccaaagtgttaggattacaggcgtgagccaccgcgcccaccctgtttagtgacttctctaaaccttttttggaaagtctgtattctttgcatgtgtggccatggaagcccctcttctgttagcttagtggtctgctggtgacttgacagagatatccttaaatgcctagaaccacagaagcaaatataacaagaaactccctataagtgctgggattagaggcatgagcgacgcccaccgtggctgtatattgaagcagtctttcaatacttagccaagctgtttacagttctgctttagtcttcacttcctgcttgtgcagagcctaaagttcagccagatgtaagagcttcaggttttctctggtattttctgagcacgcctctagccctagtcatgcatctagccgtctggatttcctggtacacaaggaagactttcaaagcccttattccctccaagtatttcctttcatggcctctttcttcccaagatgcttagtgtatctattactgcctctactgtgagtccttgcctcagatggatgtggtt[132 bp omitted]gaaaccctatctctactaaaagcacaaaaaattagcctggcatggtggcgcatatctgtaattccagctactcgggaggctgaggcaggagaattgcttgaacctcggaggcagaggttgtggtgggctgagattgcagcattgcactccagcctgggcaacaagagtgaaactccgtctcaaaaaaaaaaaaaaagattttaacacacactgcctggaaagccactttttctctggggaaagctctaaggcaggtgaagcaaagtcaagtccttgagctgttgcttcagggagccaccagatagggccacacacacaaccacaattctggagggtaagtctgaattgctccctctagtactagcgacccacaccaggaatgtgtgtctttgtcttcaaggttgccactgaactggggagctgggggtagtaagtgggtaggttaaaatgtcacagtaccctcttactgaaatttagtggtctcttcattaagcattttcttgtttttttttttttataagttttcgattagattccagaattctagaaaagttgattctgacaacttttgatagctattgattgcttttgtggagggataaagttttgaagttccctacactggcatttttggtcacctctccaagggcttttaaaaatttcattgttagagacagggtcttcctcagtcatccaggctggagtgcagtggcatgatcatggctcactgcagcctcaacctactgggctcattcgatcctcctacctcagcttccctagtagctgggactacagaagcagaccaccacgcctggctaactaaaaaaaaaaaaattttgtagagatggagtctcaccatgttgcctggctggtcttgaattcctgggctcaagcaatcctcctcatttgtaaccacccaatgggttcacgttgcccgctgcctagacagagccgatttatcaaaacaaggaaagtgtaatggagaaagagtaattcgcgcagagccggctgtgcgggagacctcagttttattatcactcaaatcagtctcctcgaggattcagggatcagagcttttaaagataatttggtgggtagaggcttgggaagtggggagtgctgattggtcaggttggagatggaatcacaggggttggaagtgaggtttttcttgctgttttctgttcctgggtgggatggcagaactggttgagccagactacagtctgggtggtgtcagctgatccatccagtgcagggtctgcaaactatctcaagcactcatcttaggtgttacagtaatgatgttatccccaggagcaattgggggagccagaggctgcgtgacccctaaacttaatttctaatcttgtagctaatttgttagtcctgcaaaggtagactggtccccaggcaagatgggggtctttggggaaagggctattatcaatttcgtttcagagtcaaaccatgaacagaattccttcccaaagttagttcagcctatgcccaggaatgagcgaggacagcttaagggttagaagcaagatggagtcggttaggtctgatttctttcattgtcataattttctcagttatcatttttgcaaaggtggtttcacttcagcctcccaacgtgctgggattatagtcgtgagccactttacccagcctccaactgcttcttgacctgtctgtgactgctgaattgattctaactgcagcccagcccctgacttgcatccctggtctctgaaccacctgacttctggcattttcaactgactttcagtttcttccagatccatctccaaacattacttcatccttggcctctgatgaccccagttagtttctgacctctgactctgttccttcccttgacttcaggcttcctccccctctatgaaccctctttgacgcatccgtgccctctttgtctctccagggttccaatgcagtttcctcagctcttggggcctgtttgctgctccgggtgatggcacgcctggagcctgacgctgaggaggcagcacggaggaaagacctggcgttcaagtttgaggggatgggcgttggtgcgtggggcacggtgcctgggagcagggacgggggctgccgccagagggggatgtgcaactccgcactcctcacatatccctgcgccatccccttaaattcccttacctctcccttcacaccctcaccctactccttcccatccctgtcacataactaactcctctgccccagacctctttggcgagtgctatcgcagcagtgaggtgagggctgcccgcctcctcctccgtcgctgcccgctctggggggatgccacttgcctccagctggccatgcaagctgacgcccgtgccttctttgcccaggatggggtacaggtgagtatctgcgacaccaacatcccaaacagtctccaagtggactctgggaagtatggggatgagcccctgccattgggaacatctatggtcttgaccagccactctccctggagatcccccagaaagtctctcttctctctcagaaaggctgctcttcccataagaagccccgctcccttccaccaaaagccaaccttcccacggcaaagcccatcttcctaaaaagttccactccagatagagaaactccttgtgaccctgtcaggaaattccacctttaaccttggaagtccttcccgctttcagggaagagtccatttctttcaaaggaagtcctagctcatccacaggaagtcctacggcatccacaggaagtcctttccacttcctttagaggtccctagtttcagttttcagcagttagaatggcctcactgaacaattacctttttttttttttggacataaacaaactttggtctaggaaatctcacccttcctataggaaatcatctgccttgggaagccctacttgctcccacagtctctccgatcctgacaagttgacattttggaaacattatcaatatttttagtttaaatctgacaggggctcagagtcccactttagtacaggaagttgtgcccaacaggaagtcccatcctcatctgttggaatggtttggctgacatttcaaacagctacccagagtcccttgctgtggatagtggttaaactcatggattccagctctaccacatacaaactgtgtttctttgggccgtttccttaacctctctgtgcctcatgtgtaccaaggaggagatactagtacccacccccttatgtgtcaagggttcggtggactaatctacataaagtgcttagccctgtatctgccatatggtgtcaatttaagtgttgactgtttactgccaaaacctggcctaagttgtctttgcctttcaccaccgtttccctacctcaatagttgtggctgtgacattgggcacttgctctgtactctggagctgcagtccaacccttgctgggcgtcttagggacggggctgtgggggagatttggatcctaatccttcccaccccccacagtctctgctgacacagaagtggtggggagatatggccagcactacacccatctgggccctggttctcgccttcttttgccctccactcatctacacccgcctcatcaccttcaggtcagtaccctggggtgagagtggtggggatgggggcggggtgctcagtttctccttcctgccccctctgcccacctttcttccctcatcggcccattgtgtcccttccctaggaatgggactctctgtccctccactaagggagtgctgtgggaggtgagttttgggggggatcctccctgtggtatctctagtggcagttactctgcctttctggccatggctctgggggaaggtccctttgggatgactttaggagaccacctctctgtccctctgccatgtctccgggtgaagaagtttgagttttgctggagaatgcctctccaccttctcttcccctcatttcttgctctgtgcttccccccttgctaggaaatcagaagaggagcccacacgggaggagctagagtttgacatggatagtgtcattaatggggaagggcctgtcgggtgagtggagcctccagcactgtgtgaggtggggacaccctgggcagttcaggacatgtgccagttccacgttgtgttagtcccctcttgagttgctacaaagttgctaaacctgagactgagtaatttataaagaaaagaggtttcattggctcatggttctgcaggttgtacaggaagcatagtgctggcatctgcggctggtgagccctcaggaagcttccactcatggcagaaagtgagggaggagccagtgtatcacatggcgagagcagaagcaggagtaggggtgccacatagatctcatgtgaactaactgagcaaaaagtctccaaagggatggtgctgagccatttgtgaaggacccaccaccaggacccaaacacttcccccaggccccacctccaacattagggattacatttctttgttctttttttctttttttttgatacggagtctccctcagttgcccaggctggagtgcagtggtacaatcttggctcactgcagcctctgtttcctgggttcctgatcagcctgcctcagcctcccaagtaggtgggagtagaagtgcatgccactacgcccagctaatttttgtatctttaaagtagagtcgggatttcaccatgttggccaggctggtgtcaacctcctgacctcaagtgatccgcgcactttggcctcccaaagtgctgggattacaggtgtgagccaccgggcccagccagggattacatttctttctttcttttttgaaatggggtctcgctctgtcgaccaggctggagtgcagtggtgtgatctccgcctcctgggttcaagcgattctcctgcctcagcctcccgaatagctgggactacaggagcccaccaccacacctggctaacttttgtacttttagtagtgacagggtttcatcacattggccaggctggtcttgaactcctgaccttgtgatccgcccgcctcagcctcccaaagtactgggattacaggcatgagccaccatgcctggcccagggattacatttcaatgtgagatttggaagggacaaacatccaaactatatcacacgtcccatcagggactgagatactgaggaagcttcccaggtgccaagctcaagacttggctcaagatttggttctgccatcaaggaggccatcaccagaaattgattttcttcatgctacacatacttccatccctctgtagcaagcggaatcagttgattgagggatttttcacctattttgttcgtggtcccaaggcccctgcttttaatcactatgctatggttgccgttaaggtattttaaaagtcaggcctaagcaaatgaaatagaatatttatcaaacttctttttttgttgttgtttttgaggcggagtcttgctctgtcgccaggcaggagtgcggtgccgcgatctcatctcactgcaacctccgcctcctgagttcaagcgattctcctgcctc[136 bp omitted]gcctcccaaaatgctgggattacaggcatgagccaccatgcctggcctatatatagttttttaagacaatgtagagaggatacaaaatatttatctgtagccataaaaaagaacgagatcatttcctttgcagtgacatggttggagctggaggccattatccataacaaactaacaggaacagaaaaccaaataccccatgttctcacttataagtaagaactaaatgatgagaacacatggacacacagagtgaaacaacacacattggggcctattggaggacagagggtagggcgagggagaggaccaggaaaaataactagtgggtactaggctaaatacctgggtgatggaataatctgtacaacaaacccccatgacacaaatttacctacctaacaaacctgcacatgtacctctgaactaaaaataaacgtcaaaaaataaaaaaaagaacaaaatatgtatcaagagagaagggaaaaactaagataaacatttggaccactgagaaaggttgatagaaggccccagtgtctgaggtcaggatcagtaatggtgtccttccctagcaatttctcatctgcacatgtgatgatgatgacgaccttgataacagctgatgttatgaaacacgtacaatgagcaactactgtgctcaattcttttgaaaatcagttggttttttttttttttttttgagatggagtcttactctgtcgcccaggctggagtgcagtggcatgatctcggctcactgcaagctcctcctcccgggttcacaccattctcctgcctcagcctcctgagtagctgggactacaggtgcccgccacc[172 bp omitted]cccagtgcaatagggcctataattattctcattttgcaggtgaaataatggagtcattcagtcacttgcctcagatcatgtggttggtaaatggtagagccgagatttgatcccagatcctcttgtacctgagtctgtgctctcagcccctgtggagcccccccactgagagctctgttgaaggacagatcccaagatccccccagagaggctggggctgagcccaggaacctgcctgtggcctggctggaggtgattcaagatggcagatgtgggggaagctttctgacccaccgctctcccttcttaccaggattctgcaggagaactgtgaaataccatgatggttttctctatcagtagggagcttgctgtcctctctgcatctgaccttctttctctaggagttcttagtttctgtagctttcactattctcctccttctcctcctccttctcctccttgtcctcctccttgtcatcctccttctcctcctcctcgtcatcctccttctcctcctcctcttcatcctcctcctccttctcctcctcttcctactcatcctcctcctcttcctccttctcctcatcctctttctcttcctcctcctcatcctcctcctgctcctgctcctccgccttctcctcatcctacttctcctcttcatcctcctcctgctcctgctcctccgccttctcctcatcctacttctcctcttcatcctccttctcctcttcctcctcttcatcctcctcctcctgctcctgcttctccgccttctcctcatcctccttctcctgctcctcctcctcctgctcctctgccttctcttcatcctccttctccttctcctttcttcttctttgagacaggatcttgatctgtcactcaggctggagagcagtggcgcgatcatggcttactgcaccctcaacctcccaggctaagccatcctcccacctcagcctctcaagtagctacagatgcatgctatgctcggctaatttttatatgttttgtagagatggggtttcgccatgttgcccaggctggtctcaaattcgaaggcttaagtgatcttcccacctcggcttcccaaagtgctgggattacaggcatacaccactgcgcttggcctcacttatttccttccttcctccttccttccttctttccttccttcctttcctttccttttctttccttccttcctttctttccttccctttctttctctctctctttctctctctgtccctccctcccttccttccttcttttcttccttccttcctccctctcttttctttctttctctatctccttccctccctccctctctccctccccccaacccttccttcctcccttctgagacaaggtctcactctgttgcctccgctgaagtatagtagcttgatcttggctcactgcagcctcaacctcccagtgtcaagtgattctcctgcctcagcctcctgagtagctgggactgcaggtataaacacacctggctaatttttttttttttttctgtagagatggggtttcaccatgttgcccaggctggtgttgaactcctgggctcaagcaatctgctcaccttggcctcccaaagtgctgggatttcaggcttgagctaccacgcccagcctcacttttttttctttttttttaaatggcagctttattgagctgtaatccacatatcataccgttcacttacttaaggtatacaattcagtgcttcttggtgtactcacagaattgtgaaatcatttccacaattcattttcaaatattgtcatcactccaacaagaaactctgtacatgcttagcactgcttttcgttttcccagccctaggccaccattcatgtacctgctgtctctgggtttgcctgttttgcacacttcacataagtggagccatgcactctatggtcttttcttcttcttcttctttatttttttattttttgagacggagttttgctctcgttgcccaggctggagtcaatggcgcgacctcagttcaccacaacctccgcctcccgggttcaagcgattctcctgcatcagcctgtcaagtagctgggattacaggcatgcgccaccacgccaggctaattttgtatttttagtagagacggggtttctccatgttggtcaggctggtctcgaactcccgacctcagctgatctgcctgcctcggcctccccaaatgctgggattacaagcgtgagctagcgcgcccagcccgtttctactttaatttttttttttttttttttagacagggtctcgctctattgcccaagctggagtgcagtggcatgttcatggctgactgcagcctgggcctcctgtactcaagtgatcctcccatttcagcctccccagtagctgggactacaggtgcttgcccctactactggctaaatttttatttttatttattttattattattattattattatttttgagacagagtctcactctgtcgcctaggctgcagtgcattgcaacctctgcctcccaggttcaagcgattctcccgcctcagcctcccgagtatgtgggactactggcatgcgccaccagacccggctaatttttgtatttttagtagagacagggtttcaccatgttggccaggctggtctcgaactccctacctcaggtgatctgcccgccttaactcccaaagtgctgcgattacaggcgtgagccaccgcgcccgatccgggtatatttttaaaatattttttgtagagatgaggttttgccatgttggccaggctggtctccaactcctcggctcaagcgatcaatccacctcttgaccggagatttcagaggtcagaggttagatacaagagtcaaaacccaagaaattagctctgggcagactgagtttcgggtcaggcagggtgagatgtgccaagccaaaagtctcgatgatggtggagatcaggactcagaggtcagagtgaggcctcctcccttctcttctcttcccccacaggacggcggacccagccgagaagacgccgctgggggtcccgcgccagtcgggccgtccgggttgctgcgggggccgctgcggggggcgccggtgcctacgccgctggttccacttctggggcgcgccggtgaccatcttcatgggcaacgtggtcagctacctgctgttcctgctgcttttctcgcgggtgctgctcgtggatttccagccggcgccgcccggctccctggagctgctgctctatttctgggctttcacgctgctgtgcgaggaactgcgccagggcctgagcggaggcgggggcagcctcgccagcgggggccccgggcctggccatgcctcactgagccagcgcctgcgcctctacctcgccgacagctggaaccagtgcgacctagtggctctcacctgcttcctcctgggcgtgggctgccggtgagtgccccggggccttggaaccctggcccctggccacctctcatccttcctgcccactcccggggtctccactcccggcttccccgcagctgggcagcaggtcaagccaaccctgctgattgagaacccctcttaggaaagtcgggcatgacgattgccccagggtaattggctggcacctggagatctggcttcagggacggcaggattcaggagaaaaccccactgtccgccactcagcctctgctgctatttattgctaggcctgaagtttaacagatatttatgggagcgccccgacctgggtgccaacctcacctcctcccttctcttcctccacatagctcgttggtcccaggccccttgccctcctgcccccgactttttctttctttcctttttttttctttctttctttctctttctttctttttctttctttctttctttctttctttctttctttctttctttctttctttctttctctctctttcttttctttctttctcttttcttttcctttcttttctttttctttttctcttttctttctctctctctccctctgtcctctgcccctctgcctccctccctccttccttccttccttccttccttccttccttccttccttctatgcttccttccatccctccaagctaagggtttaacccttgccctgcctgcattatggagtatcctgcattaggatactcctccttttgaggagagcaaacagaaaagtttgtggatacaacctggtgactggttttttgtttgtttgtttgtttttgttttctttcttttcttttttttttttgagccagagttccgctgtgtcgcccagactggagtgcagtggtacgatcttggctcactgcaacctccacctcctgggttcaagcgattctcttgcctcagcctcgtgagtagctgggattacaggcatgcaccactacacctagctaaattttttttgtattttttttgtagagatggggctttgccatattgaccaggctggtcttgaactcttggcctcaagtgatccactggccttagcctctgaaagtgctgagattacagatgtgggtcaccgtgcctggccaacaacctggtgactgtttacaagggacctgacacatcctgaatggttgacagtgatgacagtgatgatccctactcaagcttttcccagtagacacgctgagaggcaggcttcctctaagctatgttagcagtgttacaaagtgattcaacataaataatttattcaagcagggagcaagatatgagagttttgcagaacactaatacttctgtttgtaatttgttgtattttgtataaagtgacttttgagatgaaagggctaaggccatatgctaccatgctctaggattgccagtgatattttggacagtttatcaagcctaccactttccaggtgaaaaat[144 bp omitted]tctactaaaaatacaaaaaattagccgggcatggtggcaggcgcctgtaatcccagctactcgggaggctgaggcaggataattgcctgaacctgggaggcggaggttgcagtgagccaagatcatgccactgcactctagcctgggtgaaaagagcaaaactctgtcaaaaaaaaaaaaaaaaaaaaaagggagaaatgtctaatcatctccggaattgaatggatgaatcatcctttgtttcgccagttccctctagatggacatttaggttctctctttctttctttttttgttttaaatagagacagggtctcactctgttgcccaggctggtctcaaactccagggctcaagcaatcctcccaccttggcctctcaaagtgctgggattacaggcgtgagctactatgctcagccttctgtttttttattattccaaaataataaaagtttacatcccagatgtaaagtttatgggtcaaagggtacatttatttttgacatggatagatttccttctaagtagcttcactcatttccacacctgccatcagggtaagagagtgcccccttgaggccatgctcgacaatgcctgatactttcactctaaaatgtagctctcaatttaactgaaaaaaaatttgccaatttaatgggtaaacatgacctctccttgttataatttatgcactcttgactaccagataggttggacatcttttcctaagcttaatggccatatgtccttgtgcccccttgttttttttttggtttttgtttttgtttttgtttttgagacggagtctcgctctgtagcccaggctggagtgcagtggcgcgatctcggctcactgcaacctccgcctcccgggttcacgccattctcctgcctcagcctactgagtagctgggactacaggtgcctgcctccacgcccggctaattttttgtattttgtagtagagacggggtttcaccgtgttagccaagatgttctcgatctcctgaccccgtgatccgcccgcctcggcctcccaaagtgctaggattacaggcgtgagccactgcgaccggccaccctcccgtttttttaattggggttcattgatttgtatatgtataaatgtatatactccttatactctggatcctaatcctcggtagttttgttggtcttaatatcttcatatcttctcgaagtctgtggcttgtc[145 bp omitted]gatgcaaaataggggtagaatttttattttccccataggaattattgatgtttactggccgtttgaacgtcctctgtgaattgtacgtggtatcctttatctggcttccttccttttgcgtattagtttgtaaggactctatatgttttgccttttataggttggacagatattccggcagtttttccagcttgattcttacagggaccagctctttgctaaggccatcgttcattcagtcattacttaataggcgcagccattttaaaaatgggtgccagggccctgcatggaccagcttggtactgaataaatttgagtaaaccccgggtgactgggagggtcctggtcctgcccggtggaggctgcagcttcctctgaaggatggcattgggaagacttccattttccttggcgtcttgtgacacttgacccttgtggcatctccccacaccccaggctgaccccgggtttgtaccacctgggccgcactgtcctctgcatcgacttcatggttttcacggtgcggctgcttcacatcttcacggtcaacaaacagctggggcccaagatcgtcatcgtgagcaagatggtgaggcaggggcggggccaaagtgggcggggacatagggaaaggggtggggccagggagggagtggtccgtggagaaggggcgtgactttggggagcaatggggcgtgtttttgggatataggggtggggccagagtaggaaagggcggggccagactcagccacatctccccacagatgaaggacgtgttcttcttcctcttcttcctcggcgtgtggctggtagcctatggcgtggccacggaggggctcctgaggccacgggacagtgacttcccaagtatcctgcgccgcgtcttctaccgtccctacctgcagatcttcgggcagattccccaggaggacatggacggtaggggggatgacggcctgacagccttcctctgagtctctgtccccgctccctgggtctctgtcctcctggctctaagaaaatatctgtctctctgagtctctgtctccctctttctctggatctctgagtgataccctatattccccatcatcatctctctgggtctctgcctaccccaccccctctgtctttctgtctgtctttcttttttctttttttttttctttttttttgagatggatgttagaaatgtttattttgtggtgtcgtaaagaaatagtacttgaacataaatttaatttttttagtaaagccatttttattttttgtagaaagggtacactcgccagcagttttgtcatgagagtacacggaacaaaggagatagggtcatttataacctgacgcgtctattttactgctgtgtctggtttttattggctggaaccggactttacattttgtatttgtcttgattggctagtaacttagaagtttttaaaagaagcgaaggcagaggagaacaaaggaaggaggaagtaacttgtggaatgttgagaaaggtaaaaacacttttaaataaggaagaggaacaggctatgatctaatgcttgcttgaaccagtataagtatgtcagggcaaatatttaggctaaattgtgagagctaagaacataaagtacattgatttattttttatggctagtagatatttaagaatgttagcacaggtgtttgaataaattttgtttctaagagaagttactatttattgttaattagatggggaggaaagtctttgaagaggaacctgtactttactttttacatggagttttgctcttgttgcccaggctggagtgcaatggcacgatctcagctcactgcaacctccacctcccagatcgaagcgattctcctatctcagcctcccgagtagctgggactacaggcgcgtgccaccacgcctggctaacagttttgtgtttttagtagagatggggtttcatcacattggtcag[132 bp omitted]tctgaatgtctctcttcacagtggccctcatggagcacagcaactgctcgtcggagcccggcttctgggcacaccctcctggggcccaggcgggcacctgcgtctcccagtatgccaactggctggtggtgctgctcctcgtcatcttcctgctcgtggccaacatcctgctggtcaacttgctcattgccatgttcaggtgaggcctgactgctctctgatctgaccccacccagcatgacccgtggccctctcatgactcttgaaccccgtctaatgaattctgtttttagtccctgaactctgatccaatctaatgctgccttctccccaaacccaaccagaccctgcttgtaatttggactttggactgatcctctccctgagcccaggttgaacttccttatttgtatttttttgagacagggtctcactctgtcgccaaggctagagtgtggtgatgtgatcgtagcttactgcagcctcgacctcctggactcaagcaatcctcctgccttcgccccataagtagctgggactacttaaaattagccaggccagcaggcctgcctaatttaaaaaaatttttggagagaggggtctcactatgttgtccatgctagtctcgagctcctggactcaagtgatcctccctcctcagcctcccaaagtgctgggataatctgtcacctaggctggagtgtagtggcaagttctcagctcactgcaacctccacttcccactcccccatacccagttaattttttgtatttgtagtagagatagggtttcaccatgttggccttgaactcttgacctcaagtgattggcccacctcagcctcccaaagtgttgggattacaggtgtgagccatcgcgcccagccaactttgttttttattgtggtaaaattatataaaattttccatttttacttctttttttttttttttttttttgacggagtctcgctgtgtcacccaggctagagtgcagtggcacgatctcacaatctcagctcactacaagctccgccacccgggttcacgccattctcctacctcagcctcctgagtagctgggactacaggtgcccgccaccacgcccagctaatttttttgtatttttagtagagacggagtttcaccgtgttaacccggatggtctcaatctcctgacctcgtgatccacccgccttggcctcccaaa[132 bp omitted]tctcctgcctcagcctcccaagtagctaggactacaggcgtgcgccaccacacctggctaattttttgtatttttagtagagatggggtttcaccgtgttagccaggatggtttcgatctcctgaccttgtgatccgcccgccttggcctcccagagtgctgggattactgacatgagccaccgcggccggagttgatttttaccatttttaagtgtacaagtcagtgacattaattacatttacagtactctccaaccatcaccactatctattttcaatacgttctatcacccagaacagaaagtgtgtccccatgaaacagcaactccccacttcccctccccacaggtcttagtaacctccagtgtattttctgtctctatggatttagtctagatgtttcatgtaagtggaattatgcgatatttgtcttttggtgtctggctgattttactgagcatgttttcaaggctcatccctgttgtagtgtgcatcagaacttcattcattccgttttatgaatgagtaatattctattgtacaaatagaccacatttgggcccagcgtggtggctcatgcctgtaatcccagcactttgggaggcctaggcgggtggatcacctgaggtcaggagttcgagaccagcctggccaacgtggcaggaccccctttttactaaaaatacaaaaattagctgggctcatgtctgtaattccagctacttgggaggctcaggcacgagagtcgcttgaacccaggaggcggaggctacagtgagccaagatcgtgccactgcactccagcctgggcaacagagcgagactccatctcaaaaaaagaagaccacatttgatttacccgctcatctgttgatgaacacttgggttctttctgccttttggctattgtgactaatgtttgttggaacattggcatgcaagtatctatttgaatccttgtttttatttcctttgggtgtgtatctcaaagtggaattcctcggtcatgtggtaattctatgtatagctttttgagaaaccaccaaactggtttccacagcagctgcaccattttccattctcaccagcagtgtatgagggttttaatttctccacatcctagccaacacttgttattttccttttgtaaaaattatagtcatccagctgggtgtagtggctcatgcctgtaatcccagcactttggggggctgaggtgggaggattgcttgagcacaagagttcgagaccagcctgggcaacatagcgaggctgctgtctctaccaaaacaccagaaatgagataccacttcacacctgcagcctcaacctcctgggctcaagtgatcctcccacctcagcctcccaagtagctgggactacagttacgtgccaccatacctggcttgtttttttaattttttttttacttttattttatttatttatttttagtagaaacggggtttcaccatgttat[135 bp omitted]tgttaggtctctctgtttgcttcctttcttgttggcatgatttttgctgagaaaatataaaatttcattggctttggttgtttttttttttttttttttttcagagatggggtcttactatattgcccaggctgatcttgaacccctgggctcaagcagtcctcttgccttggccttccaaagtgctgggattataggcacaagcccctgtgctggacctattgtattagtttcctagggccgccagagtaccaaaaactgtgtggctttaaatcacagaaattgtctcacaattctggatgctagaggtccaaaatcaaggcatccgtcaagctgttttcttctgagggatgtcggggagagtctgttccatgcccctcctgtcacgtctagtgctttgctggccatctttggcttctagttgcgtcattgaaacttctgctttcatcttccagatttccccttttaataaaacgttacttaaattggattagggaccatgctaataacttcattttaacttgatcacatgtgtaaactctatttccgaataaagccacatatttcataaataaaaaatttaaaaaggtctcattctgaggcactatgggttatgacttcaacttttttttttttttttttttttttttggagacagagtcttgctctgtcacccaggttggagtgcaatggcgtgatctcggctcactgcaacctccacctcctgggttcaagggattctcctgcctcagcctcccgagtagctgggattacaggtgcctgccactatacacagctaatttttgtatttttagtagggacggggtttc[131 bp omitted]aattcaatgcatgacactcatagatttatgagtttatttctggactttcaattctattccactggattgcgtctatccttatgccagaaccacacagttttttgggttttttttgagacggagtctcgctcttgtcacccaggcgggattgcagtggcacgatctctgctcactgcaacatccgcatcctggattcaaacgattctcctaactcagcctcctgagtagctgggattacaggcacctgccaccacgcccggctaatttttttgtatttttggtagagacagggtttcaccatgttggccaggctagtcttgaactcctgacctcaggtgatctgcctcggctttccaaggtgctgggattacaggcgtgagccaccatgtctagcccacacagtgttgattactgtaggtttgtagcaaattttgacattggaagtatgagtctcctttgttatttttcaagattgttttggctattctgggcctcctgcaattctatatgaacttaaagatcagagtttccatgtctgtcaaaaaggttgttggaattttctttttttttccttttttttttttcttttttttgagacagagtttcactcttgttgcccaggctggagtgcaatggcgcgatctcagctcaccacaacctctgcctcccgggctcaagcgattctcctgcctcagcctcctgagtagctgggcttataggcatgtgccaccacgcccggctaattttgtatttttagtagagacagggtttctccatgttggtcaggctggtctcgaactcccgacctcaggtgatccacccgccttggcctcccaaagttctgggattacaggtgtgagccaccgcgcccggccagttgttggaattttccgagggattgcgttgaatctgtagattgcttcgggtagtattgatatttcatctaggtgttctttttaatgcttttccagcagtatttggtagttttcaggctacaaattgttcacccttttggttaactttattcctaggtgcttaacctttagatactgttgtaagtggaattgctttcttaatttcctttttggattgttcattgcgggtgtgtagaaacacaactgatttttgtgtgatcttgtaccctgcaactttgctgaatctgcagccctagaagctttcttgtgattctctggcatttcctatatataggatcatgtcatctgtgaatagagatatttttacttcttcctttccaatttggatgccttttattttttttcttgtttaattgttctagccagaacttccagcacaatgtggaatagcagtggtaaaagtggacatccttgtcttgtccctgatcttaggcagaaagctttcactctttcaccattgggtatgacggtagctgtgggtttttcagaagtaccttttctcatgttgagaaagtttatttctattcctagtttacgatttttaaaaattatgatgcatggtggcttgtgcctgcaatcacaatactttagggagccaaagtgggaggatcacttgaggccaggagttcaagaccgacctgggcaacatagtgagaccttatctcaataaaaaaataaaaaatttgccaggcgtggtggtgcatgcctgtagtcccagctactcaagaggctgaggtgggaggaaggcttgagcccaggaggtcaaggctgtggcttcagtgagccatgatttcaccaccatcatgattgtgccaccaacagagtgaaaccttgtctcaaaaaaaaaaaaaaaaaaaaaaagccatgcatggtg[131 bp omitted]tgcagagacaagagattgtagaaatgaagacacaagacaaagagatcaaagaaaagacagctgggcctgggggaccactaccaccaagacgtggagaccgacagtggcccctaatgcctggctgcgctgttatttattggatacaaagcaaaaggggcagggtaaagagtgtgagtcatctccaatgattgataaggtcacgtgagtcacatgtccactggacaggggcccttccctgttaggtagccaaggcggagagagagaggacagcttacatcattatttcttctatgctcttttaagaaagatcaaagactttaatactttaatactttcactaattttgctactgctatctagagggcagagccagctgtacagagtggaacatgaaagtgaaacaggagtgtgaccgctgaagcacagcatcacagggagacggttaggcccctggataactgcgggcgggcctgacatcagtcaggccctccacaagaggtggtggagcagtcttctctaaactcccccggggaaagggagactccctttcccggtctgctaagtagtgggtgcttttccttggcactgacgctacctctagaccacggtccgcttggtaacgggaatcttcccagatgctggcgttaccgctagaccaaggagccctctggtggccctgtccaggaataacagaaggctcacactctgtcttctggtcacttctcatcatgccccttcagctcctatctctgtatggcttggtttttcctaggttatgattgtaaagcaaggattattataatattgaaataaagagtaattgctacaaactaatgattgatattcatatataatcatatctatgatctatatctagtataactcttgttattttatatgttttattacactggaacagcttgtgccctcggtctcttgccttggcacctgggtggcttgccgcccacacatggtgaaaccccatctttactaaaaatacaaaaagttagctgagcgtggtggtgggtgcctgtagtcccagctactcaggaggctgaggcaagagaatggcatgaacccaggaggcggagcttgcagtgagccgagattgtgccactgcactccagcctgtgggacagagcaagactccatcaaaaaaaaaaaaaaaaaatcgtgaagtgttgttgaattttgtcaaatgccttttctgtgttggttgagaagatcatatggcttcccccacaccttgttctattaatttggtgtttgcattaatttttgtatgtttaactacccttactttcctaggataaatcccatttcgttatggtataaaatccacttaatgtgctgctgaattagatttgcttgtattttttcaggatgtttacatgtatattcataagggctactgctctgtaattttcttgtgatatctttatctggctttggtattacggtaatgctggcctcatagaatgagttaggaaatgttctctccttttcaatcttttggacgaatttgagaaacatccttgttattataattcttctttaaatatttgatagaattcaccagcacagccatctggttttgggcttttctttattgaaacgtttttgattcaatctcttatgataattctactgagattttctgttttttcttgagtcagcttagctaatttgtgtgttcctaggaatttgtccatttcatttatctagtttgttgacatataattgttgatagtattctcatacaatcctttttatttcggtaaggtcagtagtaatgtctccattttcatttctgatgttagttatttgtgtccaggctaactttggagcccaactttaacctgacttcaacctccaccttataccgtgataccatcccaacttgacctctgacatctgacccttggcccttctaaactgactttttttttttttttttttttttgagatggagtcttactctgtctcccaggctggagtgcagtggcacgatctcagctcactgcaacctccacctcctgggttcaagcgattctcctgcctcagcctccccagtagctgggattacaggtgcccaccaccacgcctggctaatttttgtatttttagtagagatggggcttcaccatgttagccaggctggtctcgaactcctgacctgaggtgatccgcccactccggcctcccaaagtgctgggactacaggcgtgaccaaacgcccttggctctaacctgacttctaatcgcatcctgtaacctctgactttagtgatcttgacttctgtctgctgctatagactgaacaattattgcctggcatctaaccttcgtccttgcccctggctgggccctgacctcaagtgacctttgacctctggcctttgcagttacacattcggcaaagtacagggcaacagcgatctctactggaaggcgcagcgttaccgcctcatccgggaattccactctcggcccgcgctggccccgccctttatcgtcatctcccacttgcgcctcctgctcaggcaattgtgcaggcgaccccggagcccccagccgtcctccccggccctcgagcatttccgtaagaacagagcttggcttaaaaaggagaaatataggggaccgggagcctggaaggcgaggggaagggggcatgccccaaatgactaacgggcgtggcttaggtagcgaggggcggggtttaagcaacaaggggcggagcttaagcactgaggggcagtgcttacgggtgaggggcggggcatgttctcgaatcaccaggggctgggtctgggatagcgtgcgtgttctgagggtgtcggaaggggcagctgggattgggaaggggcgtggcctgagccctttgactccgcccgcccctgcaggggtttacctttctaaggaagccgagcggaagctgctaacgtgggaatcggtgcataaggagaactttctgctggcacgcgctagggacaagcgggagagcgactccgagcgtctgaagcgcacgtcccagaagtgagagcggggcctggtcggggatggggcttctggcctggggcggatcctgacttcagctgaaggcagggtcctgggagggagggagagagggaggaggcccgggaagcaggcagagccctgggggtgggtgggctgcgggtgcccccggtaagaggccctcccttctcagggtggacttggcactgaaacagctgggacacatccgcgagtacgaacagcgcctgaaagtgctggagcgggaggtgaggccttggggcctggctgggggactgtggcaggggtcccatctcccgctctgacattcctcccattccgcaggtccagcagtgtagccgcgtcctggggtgggtggccgaggccctgagccgctctgccttgctgcccccaggtgggccgccaccccctgacctgcctgggtccaaaggtcagtgtgtagcatcagcctgtgcatctccagcctctgttcctgtatttttgcgtgtttttctctctcggcacctttccagtgtccctgggtcactctcttggtctcctttgagccttttgtactctcgccttcgtctttcttcttttttgccagtctcccagtttttctgtctctccccttccctgccaatcacctgctctctcttttctctcttcccccagactgagccctgctggcggacttcaaggagaagcccccacaggggattttgctcctagagtaaggctcatctgggcctcggcccccgcacctggtggccttgtccttgaggtgagccccatgtccatctgggccactgtcaggaccacctttgggagtgtcatccttacaaaccacagcatgcccggctcctcccagaaccagtcccagcctgggaggatcaaggcctggatcccgggccgttatccatctggaggctgcagggtccttggggtaacagggaccacagacccctcaccactcacagattcctcacactggggaaataaagccatttcagaggaatcgtgtccggaggcttgattcctgggggagctggtgggtgtctagatccaggatgggagctggagctggggtgttgggtttggggttcttggtggatttgctgctgtaattcagatattttggagtccgtttcctcccttgagccccattgttcttgccggagacccagcacttctgtctgcactgttctgacggctctcgcttcagtaggacaagaccccatctgtaccccctcccacccagtttcaactttccagtggaaaaataactcagtgataataagcaaattatttcctggaatggaggtgggtgggtgttgtgtacatctgctttggcaatagggaaacggatgatgcaaatttgagtagataaatgcatacgtgtctttaaaaagtctaattagtgggaaattgcaggccaggcgcacacagggttgaggcaaatatgtgtgattatacatgcagcttaactaaataacccataacaagctaaactggtaatgacaaggttgaactgacagcaatcattagttaaatagcaagaaagccaccaacaaccaacacatccaaaaatcaaaaccaaacatccttcctccaaattggaggagatccaagtatctgtcaccgtgggtgcagagtagcgttgaaacattgccaagtgttgtgtggcaactgcaacttctctggaagatgctgagttagttctcaccaacccaagtagtaataatcactgtaatgtaacctacttccttccttccttccttccttccttccttccttccttcctccctccctcctttcc[134 bp omitted]cctccgcttcctgggttcaagcagttctcctacctcagcctctggagtagctaggattacaggtgcccgccaccatgcccggctaatttttgtatttttggtagagacggggtttcaccatgttggccaggctggtcccaaactcctcatctcaggtgatctgcctgcctcggccttccaaagtgctggaattacaggtgtgagccaccacacccggccactttttcttcttttctttcaataaggtctcactctgtcacccaggcagaaatgcagtgactcaatcacagctcactgcaacctccacctcctgggctcaagcaattctcccactcagcctcctgagtagctggttctacaggctcacaccaccatgcccggctaattttttggatttttggtagagatggggtctcaccatattgccctggctggtctcaaactcctggggtcaagtgatccactcacctcggcctctcagagtgctgggattacaggcgtgagccaccgtacccggcctccagtactttctatatatgtgtgtccagcattgttttaagtgcttcacgtgcgctacatcagtgaaccctatgataaccatacaaggtaggttctattattgtctccattttgcagatgagaaaagtgagacacagaaaagtagctcaaataaagtcacacatagaaagtagctgagttgggggttgggcgtggtggctcatgcctgtaaaacagcactttgggaagccaagcaagtggatcacttgaggccaggagttcgagaccagcctggccaatatagcaaaaccccatcactactaaaaatacaaaaattagccgggtgtggtagcggacacctgtagtcccagctactcgggaggctgaggcaggagaatcacttgaacccaggaggcggagattgcagtgaaccgaaattgtgccactgcactccagcctgggtgacagagcaagactctgtttcaaaagaataataaaaaataaaaatggaaagtggctgcgttggaacagaaatctgggcaatccagagagcatctgtaatgcacgattttatatttggaaatgtcaactgccgtgaagtcacaggaactcactcagtccatgtgcaagtttgagcttttgtctctcagctgcaaatccacccttgcctccgctctgtgatgttggggcggagcctctgcaagccacgtttttgctttcccagctgggttgctataagccccggcctaaagagggcgctagacggagaccggccattggaggaggaagcagggatttgctccacctatttgcttcaggcatccgagcaagcgtcgccccagaacaacgctccctctgacagcagcagttgcttccaggttttttgtttgtttgtttgttttttgttgttgttgttgttgttaagacggagtcttgctctgtcgcccaggctggagtgcaatggcgcgatctcagctcactgcaacctctgcctcctgggttcaagcaattctcctgcctcagcctcctgagtagctgggattacaggcatccgccaccacgcccagctaatttttgtatttttagtggagacaggatttcaccatgttggtcagactggtctcgaactcctgacttcaggtgatccagccaccttggcctctcaaagtgctgggattacaggtgtgagccaccacgcccggccctcttccaggtttcaagttttatttttttggcacctccctaacctgtttctttttctatttctgtcgcccaggctggagtgcagtggtcgaggctcactgtagccttgacctcccaggctcaagccatactcccgcctcagccttcagaatagctgggaccacaggtgcacgccaccacacccagctaattttttgttttcaaattgtttcgtagagatgggggtctcgccatgttgcccaggtgggtctcaaactcatgggatcaagggatcctccaacctcggcctcccaaagtgctgtgattacaggcatgagccaccacgccggatgccataaccagcatcattgtcagccttctgtcacaccagcgccaccctggtagcccctggctctagtctgggtttcagttctgcagggctgctgcctcaacattttaggttctgatagctgtattctcagtcctggagtgacaggtgtagcctgcagttactatttttatacggtgcagttactatttctgcgctgtttcttctcattcctttcacggtttcctgagacctgtttaatttatctgagacccgtgtattaattcatctctgttgaagtatctatataacaggaaaactccaggtcgtgtgtgtagaaatctgacgtgagtcatcaagatggagaatttgcacgaattccacatgtaaagcgatttggagaccaaaaattccttaattgaagaggaggctggtactcttgaggaattaccctaaaataactgctgcaagcttatattttgcatcttccattcaaataggacttgtctccgtttatgcagtaactgtgtattggggaaaggaaaatactcagaccttttagggattagcagacactggcccggcctatttattcatttttgagatgcagtctcactctcttgcccaagttcgagtgcagtggtgtgatcacagctcactgtggcctggctcaagtgatcctcctgcctcggcctcctgagtagctgggatcacaggtgcacgccacca[133 bp omitted]gaaaccctgtctctactaaaaatgcaaaaattaaccgggcatggtggtgtgtgcctgtaatcccagctactaggggggctgaggaaggaggatcacttgaacctgggaggcggaggttgcagtgagccgagatcatgctgcactccagcctccgcaacagagcgagactccatctcaaaacaaaccaaaaaattggtctttaataattttttatttttgagacggaatctcgctctgtcacccaggctggagtgcagtggcgcgatttcagcttaatgcaacctccacctcccgagttcaagcgattctcctgcctcagcctcctgagtagctgggataacaggtgtgcgccaccacgtctgacaaatttttgtatttttagtagagacagggtttcaccatgttggccaggctaataaagttttaaaataaaaaaataaaagaaaaaagaaaaatacaccacatttgaggtattttccaacccatttagtgagtaacctacaaaaatgccaactcggagtgtcgtccaagtgcgtgagaaggctctgcatccggctgatgctgagcttaagctcagtcttgtgactcagcagctcacatgatactcagaaaagaatgtggcaaatcgagatgctgtatgacctccagaaagtgccaataggagcattttccggcataaactcgtagggttttggcacaaagccatgccatcttctgcacacaactcatctctgtgaagaaacaattccttgtctcggttagagatagatacctggccatggagcaccgagcaatgataaaacctgagctgaccatcaggaactcggtgtaatccgacccacaaatccagaagattgagcacaggcaatggcagtgcatcaggtggaaataagaaataaagtgttggccgggcgccatggctcactcctgtaatcccagcactttgggaggccgagacaggtggatcacctgaggtcaggagttcgagaccagcctggccaacatggagaaacccccatgtctactaaaaatacaaaattagacaggcatggtggcgcatgcctgtaatctcagctactccggaggctgaggcaggagaattgcttgaacctgggaggcagaggttgcggtgagctgagattgcaccattgcactccagcctgggcaacaagagcgaaactccatctcaaaaaaaaaaaaaaaaaaaaaagaactaaggtgttggcataagcaatgacacaagcaaattgcttgagtggacagcacagaccgttctgccatctatacccactgttttgtcttctctccatttatacccatggcttcatggacagctcctcatgactttttttcttttctttctttctttttttttgagatggagtcttgctctgttgctcaggctggagtgcagtggtgcgatcctggctcaccacctctgcctcccaggttcaagtgattctcctgcctcagcctcccgagtagctgggactacaggtgtgcaccatcacgcccagttaatttttgtacttttagtagagacggggtttccccatgttgaccaggctggtctcaaactccagacctcaggtgatctgtcctcctcggcttcccaaaatgctgggattacaggtgtgagccaccgcaccaggcagctcctcgtgattaattgaactggggaggacacaactttgggctggtttttagatggctcagcatgatatactaggattctcagagtcagccacattgcagccctcagaggaaccagcactagcctggcagtctcccttcccagaaatctgagccccagctcagcaatgcccacttctgagctgggcagcaaccctgagcaaccaatctcaagagccctgaggttcatctgatcctctctttggtaacatagcaggattggctcagcaagcctgcgctgacgccacagatacagaagaacaggctgataccagctgctgagccccagaggctgcccttttctagccagaacattttttctgaccaggaagctgtcatcgccacatagctgtttctcctcttccccgattctataaatacaaaaacacagtccttctttactgggatgctgctggccacggtgcaggcagaccgttcatgtttagccggagtcacgggctggagggatgctccctcctctacctgtgcgtcttccctcagtgaatctattcctgtctctatcacacaggcctagtggtgtgtgtgacagttggtgaccacagaggaaaattctccatctgtcctgctgccgtgttctttttgtttgtttgtttttagacgaagtcttgttctgttgcccaggctggagtgcagtggcgcgatcttggctcactgcaacctccacctccccagttcaagggattctcctgcctcagcctcctgagtagctgggattacaagtgcccgccaccatgcccggctaatttttgtacatatatatgtgtgtgtgtgtgtgtgtgtgtgtataggtatatacatatatatatgtatatatacacatatattcgtatatatgtgtatatacacatatattcgtatatatgtgtatatacatatatatttgtatatgtgtatatacatacatacatatgtatatacacacatatgtatgtatgtatgtatgtatatatatatatatgtattttttttttctgagactgagtcttggtctatcacccaggctggggtgcagtggcacaatcttggctcactgcaacctctgcctccccagttcaagccattctccagcctcagtctcccgagtagctgggactacaggcgcctgccatcacgcctggctaatttttgtatttttagtagacacagggtttcaccatgttggccaggctggtctcgaactcctggcctcaagtgatccgcctgcctcagcctccgaaagtggtgggattacagatgtgagcctgtgagccaccacacccagcctggtgctgtgtttgcaagcaacatggagtttggcccactatggaggtggaagacattccctcctaatggtggtggcaggtcacatgtaaggccagtgagtaaactggatgtccatgaagccagggtgggcagcagagctgtggtcagctagtgcagtgtactctggagaggctgctgacggggtggggatggctgtggtgtcccctcacccgggacctggtgaggccccctaagatgctgtctgttccaggtctcaggtgcagggaaagacagatgactgtaaacagaatgtgtaagacaccagaggcccccagacaagcaagtcatttgaaaaacatggttcattgtatacaaaaagaaatctctaggtagcggggctgcaggttttcagaggaaaggaggcaggaggctgggatgagggctaaagagtgcagatgcaaattacaaaattaaccgagtgtggtggtgggcgcctgtggtcccagctactcaggaggctgaggtgggaagatcacttgagcctgggaggtcgaggctatggtgagccgtcatcacgccactgtactccagcctgggtgacagagggagaccctgtttcagaaaagaaaaagacggaggccaaggaactggtaatatcaaaaggacgacgagtgtaactagagggaacggagctgtaaggttggctcaaagctgcaaccaagcaaatgggctgcggccaaaactgggatggatttgcctttttatttattttttatttttattgtatttttttgagacggagtctcactttgtcacccaggctggagtgcagtggtgcaatctcggctcacagcaaattccacctcccgggttcaagcgattctcctgcctcagccccccaagtagctgggactataggcacgcgccactactcctggctaatttttgtttgtttttgtttgtttgtttgtatttttagtagagacggggtttcactgtgttagccaggatggtctcgatcttctgacctcatgatccacctgccttggcctcacaaagtgctgggattacaggtgtgagccactgcacccggccggatttgcctttttagaacaaagacgtaggcaagccaaggggctgatacacacaaccagattaagtttggaaaaactgtgggcattggacacacgcttttgcttctcttgaatatctaggattgggatggctggatggtataggaagtgtatgtatgactttataagaaattgccaaaatcttttcctaagtagttgcaccgtttgaattttgaatttccaccagcaatgcatgagagcgttctagtggccctgatccttaccaggacctgctattatcagtgcttatgattttttgtgttttttttgagacagagtctctctctgtcacccaggctggagttagtggtgtgatctcggctcactgcaaccttcacctcccagattcaagcaattctcctgcctcagcatcctgagtagccaatattacaggtgtacaccaccacacccagctaatttgttgtatttttagtagagatggggtttcaccatgttggtcaagctggtctcgaactcctgaccccaaatgatcaacccacctcggcctcccaaagtgctaggattacaggcgtgagccaccatgaccagcaagttgtgtttgtttgtttgtttgtttgtttgtttttagcacaaagtattggctgggcacggtggcttacacctgtaatcccagcactttgggaggctgaggtgggaggatcacttgaggccaggagttcgagaccaggcttgggcaacatagtgggactttatgcctacaaaaaattttttaaaattagctaggtggggtggtgtgtgcacctgtaatcccagctacacgggaggctgaggtgggaggatcatttgagcctgcgagtttgaggctacagtgaactatgattgcaccattgcactccagcctaggtgacagagcaagactcggtctccccgccccacccccccaaaaaaaaggatcaggtaatgtgtacaagtttttgtttgaagacctgtcttcagttcttttgggtaggtacctaggggtggaatgactgggtcatatatatgctaattctgtgcttaactttttgaggaactgccaaactgttttacacagtggctggaccattgtacattctcaccagcaatgtacgggggttccaatttcttcacatccatgccaaacacttgttattcgcagtttgttttcttttctttttatttttcttttgagatggagtttagctcttgttgtccgggctggagtgcagtggcacaatcttggctcaccgcaacctctgcctcccgggttcaagcgattctcctgcctcaggatcctgagtagctggaattataggtgcctgccaccatgcccggctaatttttgtatttttagtagagatggggtttcaccatgttggccatggtggtctccaactcctgacctcaggtgatccacctgccttgacctcccaaagtgctgggattacaggcgtgaaccactgcgcccggcccagtttattttcttgatcgtagccatcctagtggctgtggagtggtgtcccattgtggttttggtttgcatttccctaaggactagtgatgctgtgttttgaccattctcacattcttttttttttttttgagacagggctggaatgcagtggcatgatcatagctcactgcatccttgaactcctgggctcaggagattctcccacctcagtctcctgagtagctgggactacagttgtatgccaccgtgcccacgtaatttataaaaaaattttagtagagacgggatcttactatgttgcccaggctggtctcaaactcctgagcacaagtgatcctcctgcctcagcctcctgagtagctgggattacagatgcacaccactatacccagctaagtttttatttttttttttttaaatagagatgggtttcattatgttgctcaagctggtctggaactcctgggttcaagcgattctcctgccttggcctcccaaagtgctgggattacaggtgtgagccactgcgcccagccttatgcgttctttggaagaaacggcttttgggtaatggcctgcactgttgtattgtatcagctgccatccagtcgaagctaactaagggcaggtgggtgttgaatgaggacaatgcccacctgcccttagttagctgtgactgcaagaacaaagaccctgttatcccaatcatcatcatgaggactagctgggccgcagcttaaagggacatttcatagcttaaaaaagacaaactgttggtcctgccacctccaactacaaaggtgttgcaactgataagccttttgggatcttgaggacgccacatctcacgtgtggaaatttcactaacgtggctgcagcaagtgaccagacagatggccgcatttgagtgggagcctctttagcaagagctttttaaaatcaagctccacccaggagctctttatcttcttcagaacccacgggattacagacatctgcaccagcccccgtgggaccttggagtccaggagaatgaataccaaggcattgatgctcatgctccctgctggctggtgagtaataaagtcccttgtctctggcccaggagtcttgtgtcttctggcaacatttgtgaaacagtaatgggctagcttgttttatttttatttttattttttattttattgattgattcattgaattagggacagggtctcactctgtcacccaggctggagtgcaatggtgcactccaacctgggctcaagtgatcctcccacctcagcctcccgagtagctgggactacaggtgcatgccactatgcccaactaattttttacattttgtagagacggtctggctacattgcccagagtggtctcgatctcctgggctcaagggatcctcctgcttcagcctcccaaggtgctgggattacaggcatgagccactgcacccagcccaggctggcttgtaagtaggacaaaatgaaagtccggacctggtagtgtggaaaaggatgggatgttgacagaggcgtggctttctggaattggaaggacagggcctccatgggcctggttcaaaaatatgagaagaatccctgggatccagtagggaattctctcatccaagtagaggaggatggccaggaatagaggtcttcactgtcctacttgtattttttttttttttttttttagatggagtttcactgttgttgcccaggctggagtgcagtggtgcaacctcggctcactgcaacctccgcctcctgggttcaagcaattctcctgcctcagcctcccgagtagctgggattacaggcaggcaccgccacgcccggctaattttgtatttttagtagagacggggtttctccatgttggtcaggctggtctcgaactcccgacctcaggtgatccacctgcttcggcctcccaaagtgctgggattgcaagcatgagccaccgcacccagcctgtcctacttgttaatgaggctcagtggctacagataggatcaaaatcagtgggcaaaacagtgggcaaatggtgcctggctgcacctgggttcttacccttctccaggcaggtggaggaagaaatgggatcatgaaaatgagacaacaagccccagggacccaaccaagaggcagcatggctgtggccgctgggtcaaagggtctctgaaaccgaagtggtatcagcaacaaggaccttgttatttgtttctttgttttgagacagggtcttgctctgtcacccaggctgaagtacagtggcgcaaacatggctcactgtagcctcaaactcccagggccaaggggtcctccccactcagcctcccgagtagctgggaccacacgtatgcaccactacacccagctaatttaaaatttttttgtagagatgaggtctcgctatgtttcccaggctggtcgtgagctcctgagcacaagtgatgcaatcacctcggcctccgaaagccctgagattacaggcatgagccgctatgccctgccttgctatttgatattgagccttcagtgggctgaaaacattagtgaagatcccaccctgcgagtgtttctggccccaccacggtccaatttggatccagtccacagctgggtgcagggctggtcaaagatgctgaggactgggagggctgagcctggccatctgtggaagagcagaaagagaggggcctctgtgcctaagaacttgctgggtcctgggaggtacctgggttgcagctctggcactgatcctggagggaggagccaagtgagccgatagagaggtcaataatgaagtttttttgttgtttgttttttgagatggagtcttgctctgtcgcccaagctggagtgcagtggcatgatcttggctcacggcaagctctgcttcctgggttcatgccattctcctgcctcagcctccccagtaactgggactacaggtgcccgccaccatgcctggctaattttttgtattttttatagagacgaggtttcaccgtgttagccaggatggtctcgatctcctgatctcatgatccacccgcctctgcctcccaaagtgctgggattacaagtgtgagccaccatgcccggccctttttttttttttttttttttttttgagatggagtttcactcttgttgcccagactggagtgcaatgacgcgatctctgctcactgcaagctccgcctcccaggttcaagcaattctcctgcctcagcctcctgagtagctgggactacaggtgtgcaccaccacacctggctaattttgtatttttggtagagacggagtttctccatgttggtcagtcaggtcttgaactcctgacctcaagtgatccgcccgcctcggcctcccaaagtgctggaactacaggtgtgagccaccgcgcccgaccaacaatgagtttttttcccctgcctttgctgtccccctgggatgccccccagccccaagttgctccagggctgaggctgtagtccctgacccacagacttcttggtccaagtacctgaattcaaccagtcaggctcccagtgggaagggaagctgaagagatctcgttgggtgtggcacctagagccaattcaatgtcccgctgtgtggtttccacgactgagcgggtgtaattggtactgatgctttacatgctcgaaaaaactacacatgccttgttatcagaggattctaccagtcggaggctgtggcatatgccgccctcttcacctctaccagaaacaatgtgggatcccagtagaaaaggaaacacaactgtaatgactaaatggctgctggagtgctccgggaagccgtttcccagtgccacagtgccacctgcctgacacggccaccaagtacactccttttaaaaagaaagggcagctgggctgggtgcggtggctcacaccaagaggtgggtggattgcttgagtccaggagttcaagaccagcctgggcgacatagtgaaaacccatctctgttttttttaaattaaaattttatttatttattttgagacagagtcttgctctgtgaccaggctggagtgcagtggtacgatctcggttcactgcaacctccacctctggggttcaagcgattctcctgcctcagcctccccagtagctgggattacaggcacctgccaccatgcccagataacttttgtattgttagtagagactgggtttcaccatgttgg[132 bp omitted]cgctatgaatcactattaagctctccttgaaagcaaacgcctggcttgtggtggcctttgactccccagcctcacacccttgttctcgggtaggttaactgcagcttcactagcaataccggaaatggccaaaggtaaagggtacgtctaagagcacagctggtctggtcctcaggtcttctgagttttacatacaaaagtcacagctacccctgtttcttctgttttctgtttcgagacggtcttgctgtgttgcccaggctggagtgcagtggcatgatcgtggctcactgcagcctggaactcctgggctcaagcgatcctcccacctcaacctcctgagtagctgggactataggcatgcgccagcatacccggttaattttttaattttttttttttccagagacagagtctcgctgtgttgcccatgctggtcttgaactcctgggctcaagcaatcctcctgccacggcctcccaaagtgctggaattacaagtgtgagccgccgcaccccgcagcagctaccccatttggagaaaactctcctccactcccctgcctgaggcaattcctctggctcaatggggccctcaattcaaacgggttcccttaaacggctgggcgcattccactatgttaaacctaaagatgtccactagggggcagcaaccacctaaccccaacaccaactccggaagacattgattgcagtttggttgatatttaaggtattcaatgggactttgtaacttcctcactatctgcgggtgtctggtattattgattgttggatcatcttcctcaagaatcagctcaaaaaggtttctggtttccccttcctacctcttcctgatccacacactttatttatttattttttgagacagatgctctgttgctcaggctggagtgcagtggtgccatctcggctcactgtaacctctgcctcctgggttcaagcgattctcctgcctcagcctcccaagtagctgggattataggcgtcaccatgcctaggtgatttttgtatttttagtagagataggtttcaccatgttggccagctggtctcgaacccctgacctcaagtgatccacccgtcttggcctcccaaagtggggggatcacaggcgtgagccaccacacccggccgcacacactttactcaggccgtttggtcactgaatgtggcagtcccagaagaggcttcatctcttcttggct[169 bp omitted]gaggcaggagaatggcatgaacccgggaggcggagcttgcagtgagccgagatcacaccactgcactccagcctgggtgacagagcaagactccgtctcaaaaaaaaagtacaattttgcccgctgaccattgttgggaatgatgcatctttctttccgctggacagcctggtggtcatgccctccagatggcagttgagtcctgagggggccaagtaggggattcaaactaatgctggtttaggcaccagaatccccttgttggaccgacatggtgctagatcaggagttggcacactatagcctgtgggatacatctggcctgtgacctgtttctgtgtggtctataaactaacaaagcttttcatatattttaaagaatgtgttgttgttgttgttgttgttgttgtttttgagatggaatctcgctttgtcgcccaggctggagagcagtggtatgatcttggctcactgcaagctccgcctcctgggttcacgccattctcctgcctcagcttcccgagtagctgggattaaaggtgcccgccaccatgcccggctaatttttgtatttttagtagagacggggtttctccatgttggccgtcctggtcttgaactcctgacctcaagtgatccacctgcttcagcctcccaaagtgctggaattacaggcgtgagccacggctcagccaagaattgtttaaaaaaaaaaaaaaaaaaaaaaagccaggtgtggtggctcacctctgtaatcctagcacttggggaggctgaagcagaaggatcacttgagcccaggagatcaagactagcctgggctatgtggtgaaagcctgtctctacaaaaaattaaaaattagctgggtgtgctggtgcacgcctgtagtcccagctactcgggaggctgaggtgggaggatcgcttgagcctgggaggtcgaagctgcagtgagatattattgtaccacagctctccagcctcagtgacagagcaagatcttgtttcaaaaagaaaaaagaaaaagatgactatgccacagaaaacaaatgccctacaaaacccaaaatactattacctggttctttccagaaaaagttggctcactcctgtgttagttgaaacaacctgctgatattacttatgtggcttaactgagacaatgtaacggtaattccagccaagcttaacaacaaaatccaatgactgtctcttctcaggttggggaggtaagctgtggcatgcccattgtggatgggggttgcttttaggctcatctgttgtcaccctgtaattgtttgtaaagacatcaaagatcagatcagtttttttatttttaaatttctttttttggtattttagcagatcagcctaaagttctctgctctgcttataatggacaatagagtcgccttagactatatcctggttgtccaaaataagatgtactggtcctctgggaccagtttttactttttttttttctgagatggagtttcactcttgttgcccaggctggagtgtaatggcatgatctcagctcgttgcaacctctgcctcccgggttcaagcgattcttctgcctcagcctcccaagtagctgcgattacaggcatgtggcaccatgcccggctaattttgtatttttagtagagacgtggtttctccatgttgatcaggctggtcttgaactcctgacctgaggtgattccccctcctcggcctcccaaagtactgggattacagacgtgagccaccacacctggacttttattttttttttattttaattttattgtattagagacagggtcttgctctgtcacctaggctggagtacagtggcgtgatcttggctcactgcaacctcaaccttctgggttcaggggatcctcccgcctcagcctcccaagtagctaggattacaggtgtgccaccacttctggctaatattgtttttgtattttttgtagagatgggccttcactacgttgcccaggctgatcttgaactcctaagattaaatgatctgccggtctcagcctcccaaactgcagggattacaggcatgagccaccttgagacttattcacagttggctgagtctaggaccctgggggacatagttgagagttgaggtcaatactcaaggttggcctgatcttgctgttgggagtcccatcaaaagtagccttaattaaaggccgaatgagacaaattgaagtgatttttttttttttttttgagatggagtctctgtggcccaggctggagtgcaatggcacaatcttggctcattgcaacctctgcctcccaggtttaagcgattcttctgcctcagcctcccaagtagctgggattacaggcacctaccacgacacctggctgtttttttgtatttttagtagagaaagagttgccccatgttggccaggctagtttcaaactcctgacctcaagtgatttcagcctcccaaagtgctgggattacaggtgtgagccaccatgcctggcctgaagtgattttattccagcctgttagttagatgaatcagagtggctgatgggtgtcagagtcatttgaaaacttgccagaagctaagatgatgcgggtctgggggtgggtattgctgtgttgggagactgtcctccacagttgtcttgtgtttcctgcatgttgtgtggggtgtgcatggctgcaaggccctggtcactgtttcttcagggttgtttacgcagctggcaaacttgagcaatgaggcaacccctcccctctcacaaagagaggcttgcttgttgattgctataaagaagagggggttccctaagctcagtgctcctctcctgtaatacaaccctctgtacgtgcaggcatccacctgggccctggcattgcccttacagagtttggagagaaaggagaaccaatgaaaacatgctgtgtttatgctgctggctgtactgggaggaatatggtcctttgtctctgacccaggagtttcatgtcttctgccaagatacattacatggacagatacattaggtagatagatacattagatatagatagatacattagatatagatagatacattagatatagatacattagatatagatggatacacagatagatacacagatagatagatagatagatagatagatagatagatagatagatagattcatttatttattgagacagagtcttgctctgtcaccgaagctggagggtagtggcttgttcttggctcactgcaacctccacctcctgggttcaggtgattctcctgcctcagcctccacagcagctgggattacatgcccacctaatttttgtatttttagtacagacagggtttcaccatattgcccaggctggtctcgaactcctgacctcaggtgatcttcccgccttggcctctcaaagtgctgggattacaggcatgcactaccgcgcccagccagatgccgccattaagtgcttttttgggaagaggttgctcacacctccatttgtacaagggatacttgcattctattagatggaagcacaatgatgttttcttgttgtataaaagtttaaataagggtagatttgtgtgaacagatactgagtagccaaaatgttggcctgtgttggacactgttgcctctcagttccatattcttctttcttctcttttctatcgatggccaggctaggaagcctacaaaacatattccccaggcccctgtggtattgtcagtgaggcatgttgctttctgctgctttaaatgctttactcacagccctaacctctttgcactcaattccagcacttatgtcatctctgcgtctactgcttgtctttttctcttggtgagttgcaattttgattctttgtatgctgagcaattttgggttgtattctggacatcttaaatattatgtgataaggtgctgggtcttgtttaaattctatgtagattgtggatacgttttgtgcgggggggttgttttgtttcgtttttgacacaaggtctccccctgtctcccaggctggagtgcagtggcgtgatcttggcccactgcaacctccgtctcccaggttcaagagattctcccacctcagcctcttgagtagctgagattacaggcatgtgccaccacagcccggctaatttttgtatttttattagagatggggtttcatcatattgctcaagctggtcttgaacttctgacctcaggtgatccacccgccttggcctcccaaagtactgggattacacgcataagccaccacgcccggcctgttttagttttgttgagacagtgtctcgctctgttgctcaggctggagtgcagtggcatgacctcggctcactgcagcctccacctcccaggctcaagcgatcctctcacctcagcctcccaagtatctgggattacaggcacgtgccaccatgcctggctaatttttgtattttttggtatagatggggtttcaccatattggccaggctggtcttgaacgcctgactgcaagtggtcctcctgcctcggcctcccaaagtgctgtgattacaggcgtgagccaccacacccggcgatacttttgttttgacaggtcactgacctagtttggttcagctcagggcttctgagcagcctgctgtgggttgtggtttcaggtgagttctgacttcaaagtcgttacaatgactttctaatctgtcttccccatggaccacccactggccagactggaacccagatggtgttgaatcccttcattgtgtcttcaacatctttggaatgttgtttaggctcagatccacatgcatcttaggggcaaacagagaaattcatgaaagcaacttcattaggtcactttcccaatctcctccctctccgcggtactttctggtttctctcccctttgttggtcctccagccagaaagctggggcctcagctaccccacttgcctcacacttcctgtgattgaacctgcatctacagcgaagtgggcaggaggatgcagggggaaagaaagcaatggggatgggtgctgtccccgggggaccacagagccttgatcagggaggagagaacagagaaagaaacagaaaaaggggaaacaggggattcccccaccctctgatcattaaaaggcattcattcattcattcattcattcattcattcgagatggagtctcactctgtcgcccaggttggagtgcagtggcgcgatctcggctcactgcaacccccgcctcctgggttcaagtgattctcccacgtcagcttcccaagtagctgggatgaaaggcatcaaccaccaggcctggctaatttttgtattttttggtagagacggggtttcaccatgttggccaggctggtcttaaactcctgacctcaagtggtccaccaaccttggcgtcccaaagtgctgggattacaggtgtgagcaacggtgcctggctggcccttattattattataaagatgataatatattcattgaacttagggccttaggacatttttttttagtcttacaatcttgctctgtcgcccaggctggagtgcagtggtgtgatcatagctcactgcagcgttgacctcccaggctcaggcgacactcccacctcagcctcccaagtagctgggaccacaggcacatgccaccacacagggctaatttttaattattttttttccagagacggaggatcttgctatgttacccaggctggtctccaattcctgggctcaagcaatcctcccaccttggcctcccaaagagctgggattacagatgtgagccacgacacctggccctgaaaattttgtttgcaatgaacaattttaagagattgggtattgttttcaaagtggaatagcagcaaatagtcctttctttgctcaagagccctatttgggtattcagaagttcttattaatgtttcccttcctcctgcttctctgcacaaccctacctcctctgcttcttctacaccaatgtacctggacttggatggcttggggtattgggctgagcccatcgctggaaggacctgaggctaggaatggtgggctgtgggcaggttaagagggaagaagaggctggaaagtttctgggccgtctgtgggagggaagactccctgggactcactcaccagggggttgctgaacgtcactgaggctgctttggtgtggcctttctgcctttgacagcaggaggaactggggtgagaacaaagctattggcaaaggagaaaggggagaggttagggatccaggaatcaggcctctgccccttctccttcagcgtctccctctttctttctttctttctttccttctttctttcttttctttctctttcttttttctctttctctttctttttctttttctttctttcctttctttctttcctttcctcctttctttccttccttccttctctctttctctctttctttctttttcttggagattccacttttgttgcccaggctgaagtgcaatggtacaatctcacctcactgcaacctccacctcatggattcaagtgattctcctgcctcagtctcctgagtagctgggattacaggcacgtgccaccatgcccggctaatttttgtatttttagtagaaaagggatttcgccatgttggccaggctggtctcaaactcctgatctcaggtgatctgcctgcctcggcctcccaaagtgctgggattacaagcgtgatccaccacgcccggcctccattgctttctgttcccagtccccgacacacacatctaaaaaggcaagttcgacgagagccaggatttttatctgtcccgtttctggttgtatccctgacacctagaacagatgagagttcttgacacagagtatgaactccataaatatttttaggccgagcatggtggttcacgcctgtagtcccagcactttgggaggccaaggagggaggattgcttgaccccaggagtttaagacctgcctgggcaacataggagatgctgactctacaaaataaaaaataacaaaatagctgtgcatggtggtgtacccctgtcatcccagctactcgggaggctgaggtgggagaatcgtttgagcccaggtgttggaggctgcagtgagacatcattgcaccactgtacttcaggctaggcaacagaattagaccctgtctctaaaagaaaaaaataaaaaatacttaaaaattagatcaatgaatgaatgaatgaaaaagtgtttgggactaggtgcagtgactcatacctgtaatcccagcactttgggaggccaagttgggtggatcacttgaggtcaggagtttgagaccagcctgcccaacatggtgaaaccctgtctctactaaaaatacaaaacttagccaggcatattggcgggcacttgtaatcccagctattcaggaggctgaggcaggagaatcgcttgaacctg[450 bp omitted]ggagtgggctggagggaacaagtgaaggctgggaggccaggagggaggctgggttgatggtctaggcaggagaggatgaggtatgaataagctggggtccgggtgtggagacgaagaaggtggaattgggcagagaaagtcagggggcagcagggatggggctgggggctgatgggctgtggggaggtgaaggggaggaaaggagagaggaaggtgcctggggtgtggcctggtgactgggtagacagtggctccactcctgagaggtacagaatctgggagaatggggtctgggaggcagatgctgagtgtgagagactgtggggagaggaggtgggccaagaagcatttcaa[135 bp omitted]acatggagaaaccccatctctactaaaaaatacaaaaatcagccaggcatggtggcaggtgcctgtaatcccagctacttgggagactgaggcaggagaattgcttgaatccgggaggcggaggttgcagtgagtcgggatctgtgtcagtgcactccagcctgggcgacagcacaagacttcgtctcaaaacaaaacaaaacaaaaaaatacccccaaacaacaacaacaaaacattttattatggaaacagttataacctacagaaaagtagagaaaatcatataacgaaaccccacgtactcatcattcagctcattccgcttcagtgtgaaacatttttgccgttcctcttttgtttacgactccatccgcacttagttatattttgctacagtgtttaatagtacatctggtgcttcttaaaaatggaaatgatttttttttggctgcagtaatggtatcatatgttctctaaagaattgatactgtgctgaaaatacaaaaaaaaaaaaaacaacataaatgggtcaggtgcagtggctcatacctgtaatctcagtactttgggaggctgaggcaggaggattgcgtgagcccaggagtttgagaccagcctgggcagcatgggaaaaatcccatctctacaaaaaataaaatacaaaaaattagccaggtatggtgatgtgtgcctgaggttccagttactggaggggctcaggcaggacgatcgcttgaaccccggagttggaggctgcagtgagctataattgtaccaccgcactccagcctgggcaacagggcaagaactccatctcaaacaacataaatgtcattcatcattgcaattctcatgcaactgatgttaaagtttggttctatatcctcctagacactttacacagatacttttgcaaaagtaggagtataccattgtaacaggaatgccacaccaaaggttgctgcctagccatgagaacacctctcctgagtggtccaagctggtggtcagagatgagcacctagaggcatctttgtcacccagcagactaggctctccactttcctgctgcttcctttaaatggaccattcagacatttgcctgtgaatttaaagtgatccacacccttctcctctgtacacctattccgctagctgtgatgcattctctctctctctctctctgactcttcttcttccctgccttgcaggacccagggatggagcagtgtcctcactcattgcactcaccctacccaggatctgtaagtaataaatcttggaccttatatatatatttattttaatttgatttccattggttattgggaaataggtggtgtttggttacatgagtaaggtctttagtggtgatttgtgagattttggtgcgattatctcctgagcagtatacactgagcccaatttgtagtcttttattcctcgctcctttcccaccctgagtcccaaaagtccatcgtgtcattcttatacctttgcatcctcatagcttagctcccacttatgagtaagaacatacaatatttggttttccattcctgagttacttcccttagaataatagtctctaatcctatctaggttgctgcaaatgccattaattcattcatttttatggctaggtagtattccatcatgtatctatatatacacatatatatgtatatatatgtgtatatatacacatatatatgtatatatatacacgtgtatatatatgtgtgtgtgtatatatatacgtgtatatatgtgtgtgtatatatatacgtgtatatatatgtgtgtatatgtgtgtgtgtgtgtgtgtgtgtgtgtgtgtgtatatatatatatatatacacaccacagtttccttatccacttgttgattgatggtgggcatttgtgttgcttccacgtttttgcaattgcaaattatgctgctataaacgtgtgtgcaagtatctttttcatacaacttctcttcttctgggtacatacccaggagtgggtgttgttttttgttttttgttttttctgtttttttttgttttttatgaagtctcgctttgtcaccaggctggagtgcagtgatgtgatctcggttcactgcaacctctgcctcccgggttcaggcaattctcctgcctc[133 bp omitted]agactcccaaagtgctgggatcacaggcgtgagccaccgcagccggcatccaggagtggttttgctggatcaaatggtagctctacttttagtcctttaaggaatctccacactgttttccatagtggctgtactagtttacattcccaccagcagtgcagaagtgtcacaccgcatccatggcaacatctattatgtcttgattttttgattatgacctttcttgcaggattaaggtggtatctcatggtggttttgatttgcatttccctgaccattagtgatgttgagcattttttcatatgtttcttggccatttccatatcttcttctgagaattgtgtattcatgtccttagcccactttttgatgggattgtttttgttcttgctaatttgagttcgttgtagtttctggatattgatattagtcctttgtcagatgtgtagattgtgaagattttctcccactctgtggttgatcggtttaccctgctgactgttccttctaccgtgcaaaagctctttagtttgattaagacccagctatttatctttgtttttattgcatttgcttttgggctcttggtcaggaaatcctcgcctaagtcaatgtctaaaagggtttccccaatgatatcttttagattttttatggtttcagggcttagatttaagtccttgatccatcttagttgatttttgtataaggtgagagaggaggatccagtttcattctacatgtggctgccaatgatcccagcaccatttgttgaatagtgtggcctttccccactttgtttttgtttgctttgctttgac[144 bp omitted]gcctccgaagtagctgggactacaggtgtccaccaccacgcccaactaatattttgtatttttagtagagacggggttccactg[139 bp omitted]gtacccatcaatctgtcatctacgttaggtatttctcctaatgctatccctccccttgcccccacccctgacaggccccagtgtgtggtgttctcctcctgtgtccatgtgttctcattgttcaactcccacttttgagtgagaacatgtggtgtttggttttccgttcctgtgttactttgctgagaatgatggtttccagcttcatccatgtccctgcaaaggacatgaactcatccttttttatggttgcatagtattccatggtatatatgtgctacattttctttatccagtctaccatcggtgggcattttgcttggttccaagtctttgctattgttaatactgctgcaagaaacacacgtgtacatgtgtctttatagcagaatgatttataaccctttgggcatatacccagcaatgaaattgctgggtcaaatggatataccataattcttaagggccctagcttttttctttttaagatggagtctcactctgttgtccaggctggagtgctgtggtgtgatcctggttcactgcaacctccgcctccggggttcaagtgattctcctgcctcagcctcccaagtagctcagattacaggtgcccaccaccaagcctggctaatttttgtatttttagtagagaacgggtttcaccatgttgaccaggctggtctcgaactcctaacctcaagtgatcagctcaccttggcctcccaaagtgctgggaatacaggtgtgtgctactgtgcccagctgccctagcatttttgaaattatagatgagtattgcctttatttatttatttatttatttatttatttatttatttgagacagagtcttgctctgtcacccaggctggggtgcagtggctcaatcttggctcactgcaacctctgcctcctgagttcaagcaatcctcttgcctcagcctcctgagtagctgggattacgggtgtgtaccactcggctaatttttgtatttttagtagacacagggtttcaccatgttggccaggctggtctcaaactcctgacctcaagtgatctgcccactttggccttccaaagtgctaggattacaggcatgagccatcgcgtccggccgagcattgcctttaacttaaagtcaccagctgcattcgcctctaacaagaaagcccacctgtcctttgaagctttgaagccagtcattgatttctctatagctatgaaagtcctacatggcatcttcttccagtagaaggccttttgtctccattgaaaatctgttgtttagtgcaaccaccttcatcaatgatcttagctagatctcctggataacttgctgcagcttctccatcaggacttggtgcttcaccttgcaccttttttttttttgagatggagtctcacttttgttgcccaggttggagtgcaatggtgcgatcttggctcactgaaacctctgcctcccgggttcaagtgattctcctgcctcagcctcctgagtagctgggattacaggttcccgccaccacccatgcctaattttttttctttttgtaattttaatagagacagggttttgcaacgttggccagtctggcctcgaactcctgatctcaggtgatcctctcgcctcagcctcccaaagggctgggattacaggcatgagccaccgtgcccagccaccttgcacttttctttacggagatggctactttccttaaacctcatgaaccaacctctcctggcttcaggcttttcttctgcagcttcctcctctcagccctcatagaactgaaaagtgttaaggctttgctctggattaggctttggcttaagggttttaccttctgtccagacaacactttctccatatcggtaataaggctgtttgacttcttattttttattgattgattgagacagagtctcgctctgttgcccaggctggagtgcagtagcacacaatctcagctcgctgcaacctccacctcccaggttcaagcaattctccttcctcagcctcctgagtagctgggactacaagtgtgcgctaccacaccagctaatttttgtatttttcgtagagatggggtttcaccatgttggtcaggctggtcttgaactcttgtcctcaagtgatccacccgtctcagcctcccaaagcactgagattacaggtgtgagccactgcatgcggccactccttagttttgtgttcactggagtagtacttttgatatctttcaacttttcctttgcattcacaacttagctaactggtgcaagaagcctagcttttggcctgtcttatcttttgatgagccttcctcataatcatttctagcttttgatttaaagtgagagatgtgtgactcttcctttcacttgaacactgcgaggccattgtagggttattaactgacctaatgtcaatattgtgtgtctcagggaataggtaggcccaaggagagaaagagatgggggaatggccggtgggtggagaagtcagaacacacgcaacatttattaagtttgccattttatatgggcatagtttgtggtggccccagtgacaatagaaacatcaaaggccactgatcacagatcaccatcacagatggaagaataataatgaggccggtgcggtggttcacgcctgtaatctcagcactttgggaggccaaggcaggtggatcacaatgtcaggagttcgagaccagcctggccaacatggtgaaaccccgtctgtactaaaaatacaaaaattagcagagcatggtggtgggcacctgaaatcccagctactcgggaggctgagacaggagaatcgtttgaacccagaggcggaggttgcagtgagccaagatcacaaaattgccctgcagccagggcacagggtgagactctgtctcaaaaaaaataataataatgaaaagatttaaaattttattgtgagaattaccaaaatgcagcccagagacacacagtgagcgcatgccgttagaaaaaaatggtgctgatagacttgctcaatgcagggttgccacaaacctttgatttgttaaaaaaaaaaaaatgcagtatctgtgaagcacaataaagctaagtgcaataaaatgaagagtgccctataagagcttagtcacccttcacctcgagtccttgattgtgatatcttaccgtgtttcctttatcatcaccgcctttcacatttattataacaatacctattatgtagcagacccatttgagagtaagctgtagacatgatgcccctttactcctaaatactgcagtgcgtatttccagaacggggacattcacctgtgtaaccacagtgccattgaaatcatgaaagtaacatcgatctacttctattatctacagaccttattcgtttttcccaattattccaatatgcttttttttttttttttgagttggagtcttgctctgtcacccaggctggagtgcagtggcgtgatctcagctcaccagaacatctgcctcctgggttcaagtgaccctcgtgcctcagcctcctgagtagctgggatgacaggcatgcgccaccaggcccgtctaattattgtattttctgtagagatgagattttgccatgttggccaggctggtctcgaactcctgacctcaagtaatccgcctgcctctgcctcccaaagtgctgggattacagatgtgaggcactgcgcctggcctagtctgtttttcttttttctttttcttttttttgagacagtctcttgctcttgtcacccaggctggagtgcaatggtgtgatctcagctcactgcaacctctgcctcctgagttcaagcaattctcctgcctcagcctcctgagtagctgggattactggcacccacgaccacacccggctaatttgtgtatttttagcagagatgcggtttcaccacattggccaggctagtctcaaagtcctgacctcgggtgatccccccacctcggcctcccaaagtgctgggattacgggcgtgagccaccgtgcccagccccctgtgaagtattaagaagggcactggggcttcctgtagcacttggaacagtgttctcagtgcccatacgtgtcaccaccctaatctcacacaaaaaagacctcaggtgatccgcctgcctctgcctcccaaagtgctgggattacagatgtgaggcactgcgcctggcctagtctgtttttcttttttgttttcttttttttttttccactggagccggagctcaagtgacttaggaagcatctcccacgttggattttaccttccttccaccacagcccaggtgatttgcagttcctggtggctggtggtctgtcctggctctgagaggagacaaaaggggtgggggtgagggtggggagggggtcccagcctcttctctccctgctagagtttagccccacccctattccacacagccgttccccaggctgggacatcccagacccaaagtccctggagagcgagggaggaggaggaaggggcccagggggtggtgggcctttgcctctgagctctcagggctctctaaattgggctgtagaattggttacgttggggatgcaggaagaaaaattgacgacttctgcttctattttttaaacaaaaataagcaaaataagcttcactgataccgtgtgtagaatgacagtagatcacaacgtaaattttcgatgtttgtttgcgatgttttttcagaaagttgttatctaataggggagtgtgacaaacgtttagagacttctaaggtaaataaaaaggtgtgaggggcaggtggagatttgggaattggtcgggaaccaggaagctggcattgattttttttttttttccaaggccatgaactttgtggggatgaaggggtctttgcccaggaagtcactgagcagtatggcttctagaagatgcctcccctgccccgagctgccttaaccccgtttgacgttcaaagacgcaggtgatgtcaccccctcccactgacaacacagtaaggtccaagttctctgaggcttcttgggccgtggcccagggaaagcaggtgacccacctcccagtgccgagtgggcaaggaactcgaccccgagtaaggaccaagcatgacggtgagctagagaggacctacatgccaggttcggttctgggcacgttaccctctattttcttatttttatttatttagagtctcactctgttgcccaggctggagtgtagtggggtgatcttggttcaccacaacctccacctcccaggttcaagcaattctcctgcctcagcctcccaagtagctgggactacaggcatgcaccaccacatctggcaaatttttaaattttttttagtagagatggggtttcaccctgttggccagactggtcttgaactcctgacctcaggtgatccgcctggctcggtctcccaaagtgctgggatgatactgtgcctggccttgttttatttgtagagagatgaggtctcactctgttgcccaggctggagtgcagtggcgattcataggcatggtcctcatgggctacagcctcagactcaaacctcagcctgagtagctaggactccatgggtgcactgcgccgggctcagcaccccacagtggtgagagttgttacggtgatttagtgtggccgtcggttactcaggtagacttggtttgttgtccttgactgctgcaccgtcctccatagcatgcatttaagatccacattttatatttgattccctaaataatgagacagcttcttgtaatcacaaacgtgatccaaacatgatcacgatgaaccatccgtttctagggtttgtgtgagaactttcctatgcttgggaatggagtcactggcccgtaaatctgtgcttaatttttttttttttttttttgagtccaagtctcgctctcagtctcgctttgcccaggctgcagtgcaatggcacggtctcagctcactgcaacctccgtctcctgggttcaagcaattctcctgccccagtctcctgagtagctgggatgacaggtgtctgccaccacgcccggctaattttttgtatttttagtagagacagggtttcaccatgtgggccagactggtcatgaactcctgacctcatgatgctcctgcctcagcctcccaaagtgctgggattgcaggtgtgagccaccgcgcccggcctacttcgcttaattaaatgctgcagactttcagctgtcttctgttctggttggaagccatctcagtcaaaacatggcaaaaccccatctctactaaaaatttaaaaataccctggctcattttgcatttttagtagagacgaggtttcaccatgtaggtcaggctggccttaaactcctgacctcaggtgatccgcctgcctcggccctcccaaagtgctgggattacaggtgtgagccaccgcacctggcccccattgcagtttgagaggctttatataataaagggcagagcactcaggaggctgctcctctagggctgcaatggtccagcatgatagctattaggcacacgtggctatttttcctttttttttttttttttggagacagagtcttgctctgtcacccagcctggagtgcggtggcacgatctcggctcactgcaaggtcccgggttcacgccattctcctgcctc[211 bp omitted]gtcttgctctgtcacccaggctggagtgcaggggcgtgatgacagctcactgcagccttggcctcccgggcccaagcgatcctcacgcccagcatcttgagtagctgggaccacaggcatgtgccaccatgaccagctaattttttttttttttttgtagagacacggtctccttatgttgcccagactagtctcaaacccctgagctcaagcgatcttcctgtcttggcctcccaacgtgttgggattacaggcgtgagccaccacacctggccaaaactcagtttttattgagctataatttacagacaacaagcacagatactaaatgtatactttaatgagttttgacaaatgacccctgtcaccaatgccccaatttccgtcactccagagagttactttgggttcctttctcttcaccccagaagcaatgactgatttccatcactacatataagtctgacctgttcttgggtttcatagataatagattcacacaatacatagacatttgtgtctggcctgttacatttaatatagaacatctttgctaagcccgaggtcataaagatattctatgttttcttccggaagtttctagttttggcttttgaatttaggtctttggttcctgttaatttggggtgggggtatggtatgtggcaggaatatgtttatatttttctatatggctatacagtagttctagccctgtttgttaaaaagactttcccttacccattgaattgctgtgatatctttactgaacatcaattggtcatatgtgtataggtggatttctgttctgttctattgatcttttggtttatctttaggctaatataacactgccctgactactgtagctttatagtaaatcttgaaattcgatagtatgagtctccaacgtgttctttctcaagattgtttggactactttaggtcttttgcattttttttttttttttttttttgagatggagtcttgctccattgcccaggctggagtgcagtggtgtgatctcaggtcattgcaacctccctgcctactgagttcaagcaattctcctgcctcagcctcctaagtgaaattacaggcacccgataccacgcctggctaattattttttagtagagatggggtttcctcatgttggccaggctggtctcaaactcctgacctcaggtgatcctcctgccttggcctcccaaagtgctgggatgaccggcataagccactacacccggccggtcctttgcattttcatgtacattttagaatcagcttgtcaattcctcaacaaacctggctgagatctgaattgccattgtgttgaatctgtagatcaatttggggagaactgatatcttgttttttgagacagagtcttactctgttacccatgcaggagtgcagtggtgcgatctcggctcactgcagcctctgcctcgcaggctcaagcgattctcctacctcagcctcctgagtagctgggattacaggtgtgtaccaccatgcccagctaatttttttgtatttttagtagagacagggtttcaccatgttggccaggctggtctcaaactgctgagctcaagtaatccacccacctcggcctcccgaagtgctgggattacaggcgtgagccaccacgcccggcctacaccaattctttgaattcataaacaaatatttccatttatttaggtttttctctcaaaaataccttgtagttttcagtatagagatttttgaatatcttttgttaaatatagtcttagcatttgatttttgaggctattgtaaatggttttgtttttaaaatttcacttaactatggtttgttgctagtatgcagaaatgtgattatttttgtatattggcttttatttttgtgactttcctaagtgcacttattctagtagctttttatttttgtagattccctaggatttcctaattacatgcttatgacatctgtgaataaagacagttttacttcttcctagccagtttctatgctttttatatctttttcttgccttctttcactggctaggaacttcactatagtgttgaacagaagtggtgtaaagggatttcccttccctgttttcagtattggggaaagtattcagtatttcatcatttagtatgatgttagctgtagcttttgtcattgttgttaatatccttaacacaatgaatgattctcaaccgagggtgatttcccacctcttccagggacatttggtaatgtcatatgacttttttttttttttttttttttttttttttgagactgagtctcgctctatcactcaggctggagtgcagtggcgtgatctcggctcactgcaaactccgcctcccgggttcacgccattctcctgcctcagcctcctgagtagctgggactacaggcgcccgccac[131 bp omitted]cactgcacttggcctgtcatgtgacatttttcattgtcacaaacagctgagtggggagcgttgatgctggcatcttgagggtgaaggctaggaacactgccaagcattctaggatgcacagcacagcctctccccaccccagcaaagaattttctgggcaaaatccccatcatgttcaggtagagaatctctgcccagcacatggaggaagttctgttgtatttctagtttgttgcaggttttttttcctccaataataggtgttgaattttgtcaaatggttcttccctttaatctattaatgtaataagttacattaatttctgggataaaaccacttgcttatactgtatccactttgtttgtggattaaatttgctaatatactttgagacagtctctcgttctgtcgcccaggctggagggcgtgatcttagctcactgcaacctccgcctcctgggttcaagctattctcctgcctcagcctcccgagtagctgggattataggcgcctgccaccacgcccggctaatttttatatttttagtagagatggggtttcatcatgttagccaggctggtctcaaactcctgacctgaagtgatccacccacctcccaaagtgctgtgattacaggcacaagccactgcgcctggccaaatttaacttttaaactcagaaatggggctatttagattttctacttgcatcagtctttgtaatttgtaccttgcaaggtgtttaagttgaacttataggtataattttgatcataatattccattattattttgatgtcatcaagatctatgatggtgctccttttgttttagagtctctgttgtgcaggctgggtcaccgcagcctccacctcctggcttcaagcgattctcttgcctcagcctcctgagtagctgggattacaggcacatgccaccacacctagctaatttttatatttttagtagagatgagattttgccatgttggccaggtgggtctcaaactcctgacctcaagtgatccgcctgcctcattctcccaaagtgctgggattacaggtgtgcgccactgtgcctggccaattccctgtattttaaatgttttttttttttctatcttttccaccagctactgaaaagaaagtgttatccaactatgattatgaatttatgtgtttcttgctggagttctgaaaatttttatctattttgaaactgttatgagctgcataaacatttatataattctggcttcctgctgaattggctcatttatcattatgaaatcctcttcctaatctgtagtgttacttgcttgacttcgatgttaatgttaccacactagctttctcattggtttgcatggtatgtttttccattcctttttttttttttttttgagacggagtttcgctcttgttgcccaggctggagtgcagtggcacgatcttggctgactacaacctctgcctcccgggttcaagcaattctcctgcctcagcctcccaagtggctgggattacaggcatgtgccaccacacctggctaattttttgtatttttagtagagacagggtttcaccatgttagccaggctggtctcgaactcctgacctcaggtgatccatctgccttggcctcctaaagtgctgggattacaggcatgagccaccgtgcctggccccattcttactttaacctgtgtctttatgaagggcatctcttgaaaacagcctgtggttgagtcctacattatttaggttgataattgctgccctgcttctctcccctctccctctgaaactccaattatacatatattagtctcacaggtcgctgatactatgtttagcttttcttaattctttttctctttctgcttcactttaatttctatgtagctatcttcaagctgatcctctcttccactggttccagtccatattaaacccatccagtgaaactttcatctttttgttttagaattcccatgaggttctttagagtttcaatatctttctgaatattgaaaaccatcgctttctattaaattccttaacatatttgtaagttgttttaaagctcttgtctgctaattctaatgtctggatgatctgtgagtcatttttctcttggtcatgggttacattttcttggttttattattttaaattttatgctggatattgtatgtagaagaaaaaacgcatgttatttgtttactttgtttagtttcaatgagttcatgccttttatcccaaaagtcggctaggatgagggctatttagatttttctaagagttgagttgagctggggctgggaacagtcttaattaaatttttctccaccttcacatggaattaagagagctcacttcgcccttgatgccccaaccttctgcacctgccatcagactagttcctttgatgttgtcattgagtttgagtgagttgggttgtggctttagatgtttatggtctttctttgtattcaactccagtggggcccaggactctgagcatcataagacttatacacacttcctcagcagaattcctgggactactgtgaggataactgttggatcaagcagttgacttatgtgttggggattcttcaagactacactacctattggcagcccatgctgttattaaatgcctggatggtttcttcttagctgtgcaaaaagtctgtccacctatgaaaactcttccactcaccttacccagattaagcacttacccacagatataaaaacattcatggccgggtgcagtg[131 bp omitted]cacacacacacacacacacacgaaaaaaattagctgggcgtggta[180 bp omitted]gcccactggtcttcagtaactttataagaaagtgtggtttttattttattcatttcaaaagctcccgctaccatcaaagctgggaggtttgtatccttcaacattctgactagaagaaaaattctgctgtgaagcatttgtgaatcccaatgcctggatgcacccaagaccaagtaagtcagaatctctggaggaggaactcaggagcgttttctcatgttccccaaatgattcaaatatacagcctgggtgtataaccactgattgtggccccatgagctgtaacagccttcttttgtgagttatagaattgattttggaatcttcctccctctatttgcgatttatggaaagcttagaacagtcgcatctctgagactattttcttacctataaagtggtggatattatattagagcattccttttttgtttgagtccgagtctcgctctgtcacatgggctggagcgcagtggcgtgatctcgactctctgcagcctccacctctgcctcctgggttcaagcgattctgctgcctcagcctctagagtagctgggaccacaggggcgtgccaccatgtctggctaatttttgtattttttaatggggatggggtttcaccatgttgcccaagctgggctcaaactcctgacctcaggtgattcatctgccttggtctcccaaagtgctgggttacaggcgtgagccactgtgtctggccgcgttcctttttttaatggctgcgagaagaaaggatgttattatgaatggaaaggtctgaagtctgaagggccatgaagctgatggattgctaaggtaaagggaggggcctttccttgtacctgtgaggctctgattacttacttctcaacacaggcgtggccattggtggtggcccagaatccctgcactagaaagacgagggatgttgtccgcgttgaggttatcaggttgaccagggctgcaatggcagccaccttgacataatcgtcacctccggccttgtaggaggtgaaggtgatgatggtccccatgcccaggctcagggaagagggtacacggcccctgcttgatgccacaggtccagggaggataaggcagagagctgtgggtgactgagaagtttttaggagtgggcttggaagggtaggactaccagtaaataagcaggctaaggggtcggctaaggtagagagcaaaaggataaaagggaggctgggggcagaaagaaaggagatgtgggggaaggagactctgaggtcttgagagtcgagagagggagaaggtttggagtcccgggcctcacctctgtggtgatcatacgtctgaggctcgtgaccacaccttccaggaagaggcagaggaggatgacggaggggaggagaggaagacagaggtgagcatcagcaggggcctcccagtcaggagtagaaatatgaacggtgtcaaggtggcccagaagtaacacgatggaattatgggaggacgattctaaggagacaatatttgtggtttggagcaaacaataagctgcccaggagtcaggggcgagactccaagtaaagatggctttgaaagggtgggtagttggacacttaattccccggccttggatttacggcttatgtgtgagtttaaggagaggaaaagaaactgagaagagactttgagagagaataacataactaagaggaattttagtgatttgccccggaggtagttgagctatggcccctctctctgcatatccctatcaaacctttagtaaagtctacttttgtaggagtggtttatttttggaggctgtgaagagatggcgagctgagtctccaggggtggagatggatgacgtgaaaggtgaccacctgcatgaatgcagggaccaggaggtacaggtagagtttaccaaaataatctgataaaca[137 bp omitted]gcctctcgagtagctgggactacaggcatgcaccaccacacatggctaatttttgtatttttagtagagatggggtttcaccatattggccaggctggtcttgaactcctgggctcaatcaatcctcccacctcggtctcccagtgtactgggattacaggtgtgagccactgcacccggcctgaaatacattttctatgtaaagggagcatgatccagatgccaaggagatggattgaaagaaaatactcccaggctgggtgtggtggttcacacctataatccaggcactttgggaggtgggtagatcacttgaggtcaggagttcaagaccagcctggccgacatggtgaaaccccatccctactaaaaaatataaaagttagctgggtgtggtcatgggcacctatagtcgcagctactcaggaggctgaggcaggagaattgcttgaacctgggaggcagaggttgcagtgagccgagatcatgccattgcactccagcctgggtaacagagcaagacaccat[136 bp omitted]gtctctactaaaattagttgggcatggtggcatgtgcctgtagtcccagctactcaggaggctgaggtaggggaatcgcttgaatccgggaggcggaggctgcagtgagccgagagcacactgttgcactccagcctggcaacacagtgagactccgtctcaaaaaaataaagaaatacaaaaaattacctggcatggtggtgggtgcctgtaatcccagctactcaggaggctgaggcaggagaatcacttgagcctgggaggcagaggttgcagtgagttgagatagcgccattgcactccagcttaggcaacaagagcaaaactcagtctcaaaaaaaaaaaaaaaaagctccaaatgggtacctggaatggaattggtgccactcagctcctttaggggttaacatgttgtcaaaatgcagggaggtggaggttgcaggactcagctggggagactgtggtctgatctgaaaggttgcccacaggtgtctgcctgcagcgatgtggggatctggttgatagtgaggcatttcttcacgctgtcaatgggacagcagttctctgtagagagacctggccgacttagcttgtctgaggagagtacagaatcttcctcggacccctggagggagacgccgggtggccacatctgagtctagctccatcatgcaggctagagtgcagtggcgcgatctcagctcactgcaacctccacctcccaggttcaagcgattctcctgcctcagcctgaggtcaagagttcaagactagcctggccaacatggcaaaactactaaaaatacaaaaattagccgggtgtggtggcaggtgcctgtaatcccagccatttgggaggctgaggcatatctgagcttgtcctcagggcaggtggaagggtcacagggattgcagaagagcagtcaacagggaagagttgggctgtgttggggtggagagtgtggaagtcttcggatttgcaaaggtgacagggtagcggggctggccgtcaggggagcttaccggcgttgaaatccaaatccctgtgatcacgaccgagaagacaacccaggctgcggttcgggacgagggcttcagccgcttcttcactgtggtccgaggcatggagggtagtgtggtacaagaagtactggtgggcccagtctgaaggcaagagacgtctcggggaggggactcaggtaccaccttgctcggtgcctacttctgttcacttcctccccttggtgtccctgcctcccttggccctgctggcccctctcctcaccagtgacactgatgttcttcaccagtgggcagtggtcccagggcagggggtgagcaaaggagtagaagaaattccaggagatgatggtgctgttgtacaagctcaccgaggcgcacacctgggggtggacacggtgggcagagacctggagaccacagagggagatcggggatggcctggggctgggtccctcatttaccagactgtgagcatagctcatgctgcacagccaggggacaagctgcttccagacccggatgttgtccacatgcagccactgccccatgatcacctccatgtataagagcgggatcccgaataagagaagcatgaagaagtacatcaggatgaagctgcctgggaagggagccaggggctgtgctcaggcagccaggagtcctggccctgtccccattttcccctaggagcccacgtgcccaaccccagctttctcctccttcagggcccaggactccaagctcccagccttgaaacgccttccttaagctcaggacccaggcccctggccttacctcctccgttccggtgacacaggtaaggagaacgccacacgctgcccagcccgacagagaaggcaatctggatcaagatgctctcagtgtttttaggttgaacgaagtagttttgggtcttggtggcctggatctccttggtcttgagcctccaggacagggagttgggggtctggaatttcttagaagactctttctctgtcagataattcctcaagggactccgtggctcttctttcaggcccggtaaatcctgagaaaatcttgggtcaccaagagcagcagaatttaaaggacacgtctcaggtgccaggctgtgaaatttcataaccagggctttggagaaatgagggccagagtttaaatcttggcccttctccttatgagttactaacttatgggcaatatacatatatattttttgagatggggtcttactctgccacccaggctggagtgagtggcatgatctcagctcactgcaacctccgcctcccaggttcaagggattctcctgcctcacgagtagctgggattacaggtgtgtcctactatatcagataatttttgtatttctagtagagacagggttttgccatgttgtccaggctggtctcagaactcctgacctcaagtgatctgcctgtctcggcctcccaaagtgctgggattacaggtgtgagccgccacacccagttctgtttttctcatcttaaaagcagcggtgaatttcaaaatatttaataaaagctatggtgtgagcactcaccaatcagaatgaatgccagccataaacactggagtatcagctgaacaccagtcctgtctgaaatgattaaaataacacaatggaatattgagtgccaagagcacagtaaacaatggatacactcaggtttctttcccgttgacttctggtgtacttggaaacttttaggcccaactaatgcacatagacttctaggccaggttttacaaacacagctgtttatcacagtcactgggggagctctaaaatgatacagattcctgccttccattctgctagcctcactcctctagattaagtctaaggtggggatagagatgggtagaattttttttcttttgagacacagtctcactctgtcgcccaggctggagtgcagtggcgtgatcttggctcactgcaccctctgccacccaggttctagcgattcttctgcctcagcctcccgagtagctgggattacaggcatgcaccaccatacccggctaatttttatatttgtagtacagacagggtttcaccatgttggccaggctggtcttgatctcctgacctcatgatccacccaccttggcctcccaaagtactgggattacaggtatgagccactgcggccagccacgatgggtagactttaaaagcttcgttgggattccacctttggaaaggcagcatgaggagctctatggacccactccctagtaaaacaagtcaacttgtgagaaatataaagaaaaacatttacggtctctagaaattgtcctaagggcatatagcaagtgacaaaatatttattcaagaaaatatactaaaattctgggcaggcacagtggctcacacctgtaatcccagcactttggaaggccaaggcaggcaggtcacttgaggtcaggagtttgagatcagcctggccaacacggcaaaaccctatctctactaaaaatacaaaaattagccaggcacgtgcttgtaatcctagctactcgggaggatgaggcaggagaattgcttgaacccgggaggtggaggttgcagtgagccaagatcacgccactgcactccagcctgggtgacagcaaggctccgtattaaaaaaaaaatttatatatatatatacacacacacacacacacacacacacacacacacacacacacacacggctctttctctgccttgcttccagttgaaggctatagtatcttcccaggagggacaggccaccagcatttctcattcctctccagctacctgttgcaagtgtggtaaaaaggtcaggagctcccttcttctatccagtactgctcctcccctcttttagggcagaggctccaccccagccatttgagaatgctggagccctgatctcccctggccctagctcatgtgtaaggctaaggttacattccaggagaggcaagttgataagaaagtttaatgccccatccagcaacctgctgctaaggcagctgtgtcgctcagagagaaataggccactgtccctacccatctctggagattttactcagggagaaagccaagccttcagaacaaagagctctgaaagtctctccccaaagaactgacttgacttgaaacagcgtgggagagctcaagcctaagggcatgctcgaaaatggtggaggaggttctgttggtaagtaattaagaggaagctggtagcttcatgagacacaagctaaaccacaggccaactagtataccagagagaatcagggaaacagctaagaaggtcactcctgggttcagaacaactctcaaacaccaacctctaaaactactcctttaagggagcctaaatttaagtggaccagatgcagaacaatttatgcctcagagcattgtcaaaaacaataatcaggtggcaattagtggagcctaaaagctgagtgtggtgagggaaagagacaggagagcccacctaaaaccactgtcatcctagggtgacaatgcatgtctaaagctgtgccctttgaggaatatacattatgaccagcaggatttattccaggaatgcaaggttggtttaatatctgaaaatcaatgttatatcaatagaataaagaacaaaacccaataaagaacaaaacccatatgatcatcacagtagatatataaagagcacttgacaaaatccaacacctttcatgataaacactcaacaaacctagaaatagaaggaaatcttgacttgataaagggaatctacaaaaaaaaatctatggttaacatcatacttaatggtgaaaactgaatcctttccaagatcaggaataagacatgagtgtttttctcaccacttctgttcaatattgtactggagattctagccagagaaattaggcaagacaataaaataaaagacatcaagaatgaaaaagaaataaactgtctctcttcccatataacatgatcttgtataaagaaaatcctaaggaatccactaaactattagaactccaataggttcagtaaggttgcagaatacaagatcaatatacaaaaattgtatttctatatacttgcaaaaaatccaaaatttaagaaaactgttccatatatgatagtatgtgatacagtttggatgtttgtcccctccaaatctcatgttgaaatgtaatccctactgttggaggtggggcctggtgagaggtgtttgggtcatggggccagatctctgatgaatggcttgttgctgacctcttgatagtgaatggcttcttgtgagatctggttaagagtgtgtggctcttcctcctctctctcttgcttctgctcgtgtgtagtagaagtgacatgctggctctttatgaccttccaccaagattttaagtgtcctgaggccttcagcagaagcagatgctagcactatgcttcctgtatatcctgcagaaccgtgtgccaaaataaaacctcttttctttataaattaaagcagcatgggactggtataaggatgcacaatagaccaataggaataccagtcaggtattcctttatagcaatgcaaaagtggcctaatgcagtgtcaaaaaaaaaaataaaatacttagtaatacatttaacaaaaggacaaattttatactctgaaaattacaaaacatgttgaaagaagatttaatgaaaagaaatcccatgtttatgaaccagaaaactaagtattaagatggcaatatttcccaagttgatctatagaattaatgcagtccatctcaaaatccctagctggcttctttgcagaaaatgaccagctgatgatataattcatctggaaattaaaggcggcccagaagagccaaaacaaacttgacaaagaacaatgtcggaggactcatgcttcctgatttcaaaacttattatactgctacagtaattaaagctgcatgggactggtacaagaatgcatataaaccaacaggataccataggatagaatagcccagaaataaacctttatgtatgtagtcaattttcaacaagagtgccaagagtactcaatgagaaaaagacagtttctccaacagatattgggaaaattggatatacacatgcaaaaaaaataaccttggatccttacactctacacaataattaacaaaatggataaaagacctacatgtaagagcaaaaactataaaccttttagaagaaaatgttggggagcaaatctctatgaccttggtttggcaatggtttcttaaatatgacaccaaaatttgtccttttgtgcatcaaaagacattatcagagagtgaaaagataacccatcgaatgggagaaaacatttgcaaatcaagtatttggtaagattcgagtatccagaatataaaaataactcctacaactgaaaaaaaactaaactcagttaaaaaaaatgggcaaagtatgttaattagccctattgcgccatttcactacatatacatgttccaaaacatcacgttgtacatgataaatatatataatttgcatctgttactttaaaaatcaattttttaaaaagggcaaaggacatcaatagacatttcttccaagaagataaacagatggccaaaaagcagatgaaaagatgctcaacattgctaatcactagaggcaggcaaatcaagaccagagttaccatttcacactgatgaagatggctacaagaaaaaaaaaaatcagtgggaaataacaactgctggggaggatgtggtgaaattagaatcattatgcattgaggataagaatgtccactggagcagccatggtaaaaaccagtttggcagttcctcaaaaagtaaaacaattaccattggatccaacaattccacttccgggtaca[135 bp omitted]cctgtctctactaaaaatacaaaaaattagccgggcatggtg[167 bp omitted]agaataaactctggtataccctacaatggaatattattcatccataaaaaatgaaattcagatacatgctataacatggatgagccttgaaaacatgttaaatgaaataagccagatacaaaaagacaaatattatgattctatttatatgaaatatctagaataggcaaattcatagagacagcatattagaggttactaggggggtgctgggcagagggagaggaattactgcttcccaggtgcagagtttctatttggggtgttgacatgttttggaactagatagagatagtggttgcacaacattgtgaaagtactaaatgccactgaagtgtttctttaaaatggctaattttatgttatgtggatttcacctcaataaaaataataaaagatgatgaaataatgctaccagacagacaaaagttgggagaatttgtcattagcacatcagcactgcaaaaaatattaaaaatctttgggctgaaggaatattattggagctggaaagagatgtaagagtaaaataagagacgcagaaacacatactgcgtgatttcactcatacgtggaatctgaaaaagttgatctagaagtagagactaaaatggtggttaccagagtggggatgatgggggagtggggtgctggggagttgttggtcaaataatacaaaatttcagttagatgaaaagaataggtttaagataactatcattcaacatggtgactaaagttaataactacactgtaatcttgaaaaatgctgattttaaatattctcaccacaaaaatattagatatgtaaattagctacatttagcattccacaatgtatatatatttcaaaacatcatgttgaacacaaatacatacaatttcatctgtcagttaaaaaataataacataaaatttagaaaggaataaagaaaacctgaaagggtgtcccagctactacctaggtcaaagtagtcctagctactcaggaggctgaggagagaggatcacttgagccccagaagttttgaggctgcagtgagctgatcatgccattgcactccagtttgggcaacagagcaagaccgtgtaggcaaatttgagactaatgagtgcttaaagtaacaatagcagcaatgtattgtggggttcataatatgtagaagaaaaatattggagaacaattgaaaaaaaaaatggtgggaaaactagaaatagaaggcaacttccttaatctacagcttccttaagcctataactaacatcacactgaacaatgaaatatgaatgcttttctcttgagtttggggacaaggtaaggatgttcattccacattgtattaaaggtcctagcctgtgcaataaggcaagaaaaaaaagtataaagatcaaagtaaataaaactttccttatttaaaggtgatgtaagtatactgtcaagagatcatgtatgtagctgggcacagtggctcatgcttataatcctagtactgtgaggcaggaggatcagttgaggccaggagctcaagaccagcctgggcaacatagcaaaactccatttctacaaaaattgaaataaaaaattggccagatgtggtggtacacgcctgtagtcctagctacacaggaggctgaggagagaggatctcttcagcccaggagtttgaggctgcagtgagctgatatgccactgcattccagcttggacaaaagagtaagaccctgtctcaggaaaaaaaaaacccagatattgtatatgtaaaaagaatctacaaatggatgaaattaagtttgtaatcgaatttagcaaagttcctatatataaggcgattgtacaaaaaattatatttttgtatagtagcaacaaataattggaaaatactattttaaaacatcaaagaaatttaatacttagtaatcaatgtagttaaaatgtgtaagacctcgctgaaaactacaaaacaatgcaaaacacttagagaattttaccatgttcatgagttggcaagttgaacatttttacaatgtcaattatccccaaattgatctacagattcagggcaatcttaaacacaaaatcccatattgttggttttttggaaacagacaagctcgttctaaaattatatggaaagccaaagaccttagaatggctaaggctatcttgaagaagaccaaagttggaagacttaacttaccgtggacttatcttattatcttaagatttactctaaggctacataattaaaacaggaggggaggggcgggggagatgggggaggggctggagagaggggtgggagtgtggtgttggcaaaggataataaatagatcaatggaaaagagagtccataaatatactccagcctatgtggtcacttaatttataatagaattgccactgtgattgggtggcgatggatggtcttttcaataagtagtgccagaataatgatatctatgtagaaaataagcttgagcccacctcacatgacacacgaacattaattcaagatgaatcatagatataaatgtggagggtaaaacaaaagagattccaaaaaaatatgaaaatatcactttgactttgggtagcacattttcttaaatatacacaaagaaagcactaagaaaattagaactcaacctcattaaaattaagacgtttttaaaaattcaatgacatctttaagaaagtaaataggtaagccacagacggaacacatttgtaatgcacacatgtgacaaatgacttgtattcagaatataaataatgcctacaaaacaataaaaaaaaaaagcctaagaaaaggtgaaagacttgaacagggacttcacaaaagcagctattcagatgaccaatagccatataaaagtgctagatatcattactcatgatgaaaatgcaaattaaagccacaatcaggtactaccgcacagctaccagcacgaccaaaactgaaaacactgagctcatcagatactgtccagaatgtgcagtgaccgcagcgcccttccatcgctggcgggagcggaaagtgatttcaccattttggacgggtgtttggcagactccctaaagacaaaaacacctgttctatgacccataaagtcacgtctatgtgcataaaaatatgtacgagaatatttgttgccactttattcacaatagcctccaaatagtggcatattcatacaatgtaatacacaataaaaaagatccagttactgatgcccccaaaacacgaagctcaaaagcttttcagatttaattaataattttaatggttaataaagtatattctttttaaatttaaaaatatttaattgacaaaaactgtatatattcaaggcataatatgatttatgtatacactgtataatgattaccacaatcaaattaacacatccataaccaccataattatcgtgtgtgtgcgcg[142 bp omitted]caaaactactaaaaatacaaaaattagccaggtgtggtggtgggtgcctgtaatcccagctactcgggaggctgaggcaggagaatcacttgaacccaggaggcagaggttgtagtgagctgagattgcaccagtgtaccctagcctgcacgatggagcgagactgtctcaaataaaaaaaaaaaaatctgttctcttatcaaattcaggtaaataatacagtattattaactgtagccaccatgtatatattagatccccagaacttaataatcttataactcaaagtttgtaccctttaaccaacatctccccattccccataagccc[224 bp omitted]gaagcaggaggatggcatgaacccgggaggcggagcttgcagtgagcggagattgcgccactgcactccagcctgggtgacagagtgagactccatttcaaaaaaaaaaaaaaaaaaaaaaaaggcaatctatggaatcagaaaatatttgcaatgtacatccgaaatatgaatggaactcatacaacttaatagcaaacaaaccaaacgacctaattaaaaagtggacaaaggacctgagtagatatttctccaaagaagacatacaaatggccaacaagtatataaataaatgctcaacatcagccgggttcagtggctcagcactttgggaggctgaggcaggtggatcacctgaggtcaggagttggagaccagcctggccaatatggtgaaaccccatctccactaaaaatacaaaaaattagctgggcatgatggcatacgcctttagtcccagctactcaggagctgaggcaggagaatcacttgaaccccggaggcggaggttgcagtgagctgaaatcatgccactgcactccagcctcctgggcaacagagtgagactccatctcaaaaaaaaaaaaaatgctctggctattcagggtcttttgttattccatactctgggcggcaagccacctaggagccaaggcaagagaccgagggcatgagctgttccactatagtaaaatatgtaaaaacaacaagagttatactagatctagatcatagacatgattacatatgaatatcattaatcattagtttgtagcaattactctttatcccaatattataataatcctcgctctacaatcataacctaggaaaaaccaggccatacagagacaggaggtgagcggacatagtgagaagtgaccagaagacaagagtgcgagccttctgttatgcccagacagggccactagagggctccttggtctagcggtaacgccagcgtctgggaagacaaccgttgccaagcagactgtggtctagcggtagcgtcagtgccaaggaaaaacacccactacttagcagactgggaaagggagtctgcctttccccgggggagtttagagaagactctactcctccacctcttgtggagggcctgacatcagtcaggctcacccgcagttatccagaggcctaaccatctccctgtgatgctgtgcttcagtggtcacgctcctagtccgctttcatgttccatcctgtacacctggctctgccatttagatagcagtagcaaaatcagtgaaagtactaaaagtccctgatatgcagaaataatggcataagctgtctctctctcctttctctgcctcggctgccaggcagggaagggccccctgtccagtggacacatgacccaggggaccttacctatcattggagatgactcacactctttaccctgcccctttgtcttgtatccaataaataacagcacagccagatatttggggccactaccagtctctgcctcttggtgatagtggtcccccgggcccagctgtcttttatctctttgttttgtgtctttatttctacaatctctcatctccacacacacggagaaaaacccactgaccctgtggggctagtccctacaccatacaaattttaggatttttttgtgaaaaatgtcattggtatttttgcaggaattgcattgaatctgtacattactttgagtagtatggacactttagcaatattaattctcccaatccatgagcattggatgtctttccatttattagtaatctcttcaatttcttccaccaattttttatagttttcattgtagagatcttttacctccttggttaaatttgttcctatgtattttatttttgttattattgaaaacaggattgttttcttgatttctttttcagatagtttggtgttggtatatagaaacactagtgatttttgtatgttaattttgtgtcctacaacttcactgaacttgtttaatctaacaggtttttggagaggctgtagggttttctatatataagatcatgtcttctgcaaacaaggacaatttgacttccttcttttcagttggatgcttttttttctcttgagatggagtttcgctcttgttgcccaggctggagtgcaattacatgatcttggctcaccacaacctctgccttctgggttcaagtgattctcttgcctcagcttcccgagtagctgggattacaggcatgcgcccccacccctggatgccctttctttctttccctggcctaattgctctggctaggactcccagtactatgtggaatagaagtggtacaaccttgtgtttttctgtattttagaggcaaagctttcaactttttccccattgagtatgatgctagctgtgggtttgttatatatggcctttattgtaaccaactatgttcctgctatatctaatttgttaagggttttcatcatgaaggcatgttgaatttgagatcatatggtttttgtccttctattaatgtgatgtatcatgtttattgatttgcatatgttgaaccatccttgcatccctgggatgaatcccacttaatcatggcaaatgaccttcttgatgtgctattttaaagaaatagcatcggccaggcccagtggctcacacctgtaatcccacctttttgggaagccgaggcaggaggattacctgagctcaggagtttgagactagcctgggcaacatggtgaaaccctgtcgctactaaaatacaaaaagttagctgggcatggtggagtgcacctgtagtcccagccactcaggagactgaggcaggagaatcacttcaaccaggtggaggttgcaataagctgagatcacgccactgcactccagcctgggtgacagagtgagactctgtctcaaaaaaaaaaaaaaaaagaaggaaagaaatagggtctatgttgcccaggctggacttgaactcctggactcaactgatgtttccacctcagcctcccaagtagctgggagtacaggcacgtgtcaccatgcccagctacagttctttaaatgtttggtagaatttgtaactgaattcattagatccagagctttttttcaatggaaaactttttattaattcaagcttgttgctcattattggtctgttcaggttttctaattcttcataatattggctggttatatgtgtccaggaatttatccatttcttctaagttttccatatagttgttcataatagtctctaatgatcctttgtagttctgtgataccaattgtgatgtctcctttgtcatttttttttttttttgagacactctcactcttgttgcccaggctggagtacaatggcgtgatctcagctcactgcaacctccgcctcccagttcaagtgattctcctgtctcagcctccctagtagctgggattacaggtgcccaccaccatgcccagccaatatttgtattattagtagagacagggtttcaccctattggccaggctggtcttgaactcctgacctcaggtgatccacccacctcagcctcccgaagtgctgagattacaggcgtgagccactgcacccggcctttgatctatttgaatcatctctctttcatacttagtctagctaaaggtttgttgattttgtttatcttttcagaaaccaactctttgtttcgttgatcttttgtatttaattctctagtttatttctgctctgatctttatttttttttcctttactaacttggggtttcatttgttctcatttttccagatttttagagaaaatcccttaatcagaaaggaagactaagagaaaaaggaagaaaagatctacaaaacaactaggaaaaagtaacaaaatggcagtagtaagcccttacctatcaataattaccatgaatgtaaatggattaaattctccagttaaaagacagactggctgaacggattaaaaaacatgacctaactaaagttggccattgaacaatatgagtttgagctgcaggagtccaatgtcatgcagattttcttccacctctgccactccgagtcagcaagaccagcccttcctcctcctctccctcagactcctcgatgtgaagaccacgaggatgaaggcctttgtgtgatgatcacttccacttgataaacattaaatatattttatcttccttatgattttcttgataacattttttctctaggttgctttattggaaaatatagtgtataatagattcaacatataaaatatgtgttaatcgactttttatattgttggtaaggcttcgggtcaacattaggctattagtagttaagttttgggggagtcaaaagttattcgcagattttcaactacatgggggttggtgcccctaaccctacatcattcaagggtcaactgaatatgttgtctacaaaagactcgcttcacctgaaaggacacacacagactgaaagtgaagggatgggaagatatttcctgcaaatgcaaagcaaaaaagaacaagtagttatatcagataaaatagatcttaagcctaaaactgtaaaaagagacaaagaggccattatagaatggtaaaatagtcaattcaacaagaggatataacaataataaatatatatgcacccaatattggaacatctaaatttataaagcaaatcttaaataaacctaaagggagagatagactgcaatacagtaatagtagaggatttcaacactccactttcagcaatggacagatcatccagacaaaaatcaacaaagaaatatcagagttaaactacactccagaccaaacagacctaacaagacacttacagaaccttccatccagtagccatggaatacacattcttctcaaaaccacatggaacattatctagtatagatgatatgttaggccataatacaagtcttaacaaattttaaaaagctaaatcatattatcttttttgacaatagagtaaatctagaaattaataggcagaacattggaaacaaatatttggaaattaagcaacatgctcctaaaccaccaatgggttgataaagaaatcaaaaaggaaattcgacacaaaggaaaatgggaatacagcatattgaaacctgtggaggctgggcatggtggctcatgcctgtaatcccggcacttttggaggccgaggcgggaggatcacttgaggtcaggatttcgagaccagcctagccaacatagtgaaaatacaaaaaatacaaaaattagccaggcatggcaatgggtgcctgtagtcccagctactcagggggctgaggcaggagaatcacttgaacccgggaggcagaggttgtagtgagccgagattgtgccattgcactccagcctgggcaacagagtgagactctgtctcaaagattaaatgaataaataaaaataataaaacctacaaatacagcaaaagcagtactaagagggaaacttaaagcaataaatgcctatataaaaaatatttgaacaattagtaaacctgactgactgtggcctgttaggaaccagccaaacagcaggagttgagtggaaggcaagcagggattattgcctgaactctgtctcctgtgagatcaacggcagcattaggttctcacaggagctagaaccctgctgtgaactgtgcatgtgagggatttaggttgcacgctccttatgagaatggaatgtgtgatgatctgaggtggaacagtttcatcctgaaaccaccccccacactagtgccaaaaagattggggaccactgaataaattgcttctgtaattagtaactttgctccaaagcaaacttctggtgaagatgacttcactgaatcgtgtcagacatttaagaagtaaatgctgtcagtttggtgtaaaatcttccagaatagaaaaagtggcaagacgagtataacttgagtacctagtctagcaagggaattatgataaaatcacacaccaatgtcattcataaaccttgatgcaaaggtcccaaaaaataaccagcaaatgaaatccatcaatacatgaaaactatatatcacaaatgattttgcttaaaagaaaatcagtgataacataataaggatacagatcatatgaccatctcaatttgtagaatatttgatgaaacccaataaccattcatttattaacaaaagtagctgggcatggtggctcgtgctgtgatcccaggacaggactttgggaggatgaggcaggaggactgcctgaggccaagagtttgagataagcccttgcaacacagcgagatcccttctctacaaaataaaaaataagataaaagccaacctcttagcaaattagagtagaaaagaacatctttaatttcataggaggtatttataaaaaaagcataaagtaaacattatacttgataaaacattgaagggttttccttcaaagtcaggaataagacaaggatgtctgccaccatcccttctagtcaaattgaatttaaagtttgtgtagactgatggccttcatggtaccaagtcttcaatttttcctatatccaccccctctgcaatgtgattctacagtttgtctaagatcatatctactctcctgctccttgaacctgggcttgtatgccgattcagcgcctgtgctgcaagagaccttacttgttactgcttattctctaactcttccgccatcgctatgaggacatgtctgggctaatctgctggaaactgaaatatatattagagctgaatcactccagtggtactagctcaagctagtctagattagccaagaggcagcccattcccttttatattagctgagcccaaaataatgactcataagctgtaataaaaaattcttgttttaagtcattgaagtttgaggtggtttgttatgcagcattatggtggcaatgagtcattgacacaaggtacaataaaatgaaaaaaatggtttagaaaagaagaaataaaactattatttatggatatgattctgtatataaaaaggaaaaaaatcaccgggcgcaatggctcatgcctgtaatcccagcattttgggaggcctaggtgggcagatcacctgaggtcaggagttcgagaccagcctggccaacatggtgaaaccccatctctactaaaaatacaaaactagccaggcatggtggcgtatgcctttagtcccagctactcgagaggctgaggcagaagaatcactgaacccagaaggtggaggttgcagtctgcgagatcatgccattgcactccagcctgggcaacaagagcaaaactctgtctcaaaaaaaaaaaaatctataaatacattactaggattaatgagtgagtttagcaaggttgctggatacagggttaatagaaaacaatattaatagcgtttctacataccagcaagaaataaataggtaataaaaaaataaagataacatttataataacaagatattttctgtgcctaggaatagatctaacacaaaagtacaaaacttctataccaaaacctataaattattattattgttattattatattggtgtcttttgatgaaaaaatgttctaaattttaatgaactcaaatttatcagttccctcatggttaatattttctaaaagctatttaatacatctttctttcttttttttttttttttttgagacagagtttcgctcttgttgcccagactggagtgcaatggcgcgatcttggctcaccgcaacctccacctcccaggttcaagccattctcctgcctcagcctcccgagtagctgagattataggcatgcaccaccacacctggctaattttgtatttttagtagagatggggt[136 bp omitted]gaagttattcttccacataacttctaaacactttataaatttgcctttcatgcttaaatctgttaatcctcatggattaacactgttcttgataataataatgattataggctgggcatggtggctgacccctgtaatcccagcactttgaaaggccaaggcgggcagatcacctgaggtcaggagttcaagagcagcctgggcacgatggtgaaacctcatctctgccaaaaatacaaaaaattagctgggcatggtggtgcatgcctttagtcccagctattcaggagcctgaggcgcaagaatctcttgaagctgggaggcagaggttgcagtgagccaagatcatgccactgcactccagcctgggcaacagagagaccctgtctataataataataatggttataggttttggcatagaagttttgtattttttttattagatctattcctaggcacttaaaatagcttcatgttattataaatgttatctttatatttttcattacctatttatttcttgctggtatgtagaaacgctactaatattgttctattaaccctgtat[136 bp omitted]atctccatctcccaggttcaagcgattctcctgcctc[220 bp omitted]tactaacctatctcctttttattataaaatacacatattccaaaaagtgtacaaaactgaaatgttcacctgaatgatttattgtaaagcaaatgccccaaccatcctagccaagattgaaatctgagtatcaggaaacaatatttaagattaaaagtaccgagcacattagagacgtatggtacatgctcaacacgcaaagaaaaaaataacagccacaagcctatatgtaccaaacaactggagagctaaatatttaaggcaaaacacgtataaaaccaaaaagaaattgatcaaaatataactacgatggcaattatcatacaactttttcagaactcacagatctaatagagaaaaaaaaggacatagagaaattgaataatgcaaacaaatacgatttaatagatacttagtcatattagaaatgaacaattttagggaagggagatggatttgtgaaccctggagtgcggttctgcctactcgaggccgctgctgtgtggagacccctgggtgaagccactgtcatcatgtctgaccaggaggcaaaaccttcaactgaggacttgggggataagaaggaaggtgaatatattaaactcaaagtcactggacaggatagcagtgagattcacttcaaagtgaaaatgacaacacatctcaagaaactcaaagaatcatactgtcaaagacagggtattccaatgaatccactcggtttctctttgagggtcagagaattgctgataatcatactccaaaagaactgggaatggaggaagaagatgtgattgaagtttatcaggaacaaacgtagtggggggcggtcattcaacggcttattctttttttattttccctcgatcctttaatcctttatttttaaaaatagttcctttgtaatgtggtgttcaaaacgcaattgaaaactggtaccccatctctttgaaacatctggtaatttgaattctggtgttcattattcattatcatttgttttcattgtgctgatttttggtgatcaagcctcagtccccttcatattaccctccttttttttttttttgagacggagtctcgctctatcgcccaggatggagtgctgtggcgcgatctcggctcactgcaacctccacctcccgggttcactccattctcctgcctcagcctcccgagtagctgggattacaggcacccgccaccacgcctggctaattttttgtattttcagtagagacgggctttcaccgtgttagc[132 bp omitted]cctttttcaggacattgcattttcaggcttgtggtggtgataagtaagatcggccaatgcaggtgttcataatgactttccaactggccctgatgttctagcatgtgattgcttcactcctggactgtgactttcagtgggagatgggagttttttcagagaactgaacagtggaaaaacgacctttccttaacttgaaggtacttttaaaatttgagggtctggaccaaaagaagaggaatatcaggttgaagtcaagacgacagatcaggtaagagtgatgcctaactccaaagatggcttcactgaagaaaaggcattttaagattttttttaaatcttgtcagaagatcccagaaaagttctgattttcattagcaattaataaagcaatacacgtagaaatgaataaggcagaacactgctcttttttatttgttctttttggcctgggatatgggttttaaatggacattgtaccagcttcattaaaataaacaatatttgtaaaaatcgtaaaaaaaagaaatgaacaattttaaaagagaaaataaccttaatgacttggaaattaagaaatatgcttctgtggtgagagggtcatttgagctcaggcgttcaagaccagcctaggcaacacagcaagacacccatctcatatctatatatctatctatatatatatatatatatatatatacacacacacacacacatacatacacacacacttccagataatccttggattaaaaagaagctaagtagaaaattacaaagtttccaggtagcataaaagtgtgtgtgtatatatatttccagataatcctatacacacacacacacacacacaaccccacacacacacttccagataatccttggattaaaaagaagtagaaaattacaaagtttctaggtagcataaaaaggagatttcatatcaaaacctttgacatacagcaaaaattacactttactgaagactaaagatgatgaataaaggaacttaatactccccttaagaaatcagaataggctgggcgcagtggctcacgcctgtaatcctagcacttcgggaggctgagacaggtggatcacttgaggtcaggagtttgagaaatcagaagaataaagacaaaacaaactagaaattgtaattataaagttgacattaataagatagaaaataaagtaaaaatgctaagtaaatccaaatgccacttgtgaatctgattgagaaaaagataaataaaaataacaaaatgtaaaaaatgagaaaagagacacagccatcaaatttagaattttaaggacatatgctatatgaaatcctaggtcaacaaatctgaaaccttagaggaaactgaaagtgtctggcaaatgtaaattactaaaaataatccaagaattttggggaaaattaatggaaagggttggaaagatgagtagagatttactgcacaaatgggctctgggaccagatgggttcagagatgagttcgatttaacctttaaaaagcagatggttctaatgtcaattacaccaggctgctcaaagtgtggcccacgaatcctaagcatcacctgggagtgtgataaatgcaaattaatgaacctgaatccagattcaccacataaaaatcactagcgggcggccgggtgcagtggctcacgcctgttatcccagaactttgggaggccaaggcgggcagatcacgaggtcaggagttcgagaacagcctggccaacatggcgaaaccctgtctttactaaaactacaaaaattagacaggagtggtggtgcacgcctgtaatcccagctattcgagacggctgaggcaggagaatcgcttgaacctgggaggcggaggttgcagtgagccgagatcgcaccattgcactccagcctgggtgacaagagcaagactctgtttcaagaaaaaaaaaaaaaaatcactagaagatggggcccaacgatctgtttaaccagctttccaggtgactttcagcatactaaagtttgagcagcactggcttaggatcacagaaaaaataaagagcgcctcaatttactttctgaagctagcataactttaatgccaaaatttataaaaagtagaaaaaaacccctcatttacaaagacgagatgaacaagctaaatattagcaagtagaatctagaatatatcaaaaggataatacattacacctaagtagaattgatcccacaaggagagttcaatatttaaaattctatcaacaagtccactaaatgctaaaaagccatttggcaaaatgcggcagttctatgaatatactaaatatcattgaattgtaaacttttttttttgagacggagttttgctcttgtcccccaggctggagtgcaatggcatgatctcagctcactgcaacctctgcttcccaggttcaagagattctcctgcctcagcctcccaggtagctgggattacaggcacccaacaccatgcccgcctaatttttgtgtttttagtagaggtggggttttgacatattgaccagggtggactagaattcctgacctcaagtgatccacccacctcggcctcccgaagtgctgtgattacaggaatgagccgccatgcctggccgaattgtaaattttaaataggttgattgtgtggtatatgaatcacatttcaataaagctgtcacagaagactatcttaggcctctggacaaaagggagcttgggagtgtctggtagacatctctgatagcaataactttccttaaccctacccttatggcagatacacctgacagcaataacttaagctgcctctgagaatgagggttgccacgtagaggttgctaggggaggatgctaagtgaaagtgccctatgaactgcatttttttttcttttttttgagacagagtctcgctctgtcacccaggctggagtgcagtggtaccatctgagctcactgcaaccttgcctcccaagttcaagcgattctcctgcctcagcctcccaagtagctgggactacaggcgcccgccaccatgcccagctaatttttatattattagtagagacggtttcaccatgttggccaggctggtctcgaactcctgacctcaagtggtccacctgcctcagcctcccaaagtactgggattacaggcacgagccaccgagtctggcctgaactgcatgctttttgcaaatggttgtagttctcctgtccagtccaccaccactggcccatgctgcaagttcccccaaataagccctgtgttttgtgtgctggctctgggtctcttcttcagcctcttgaacttggtgccatggctactgaagttaacaggcatttggcacgacaaccgatgatcccagcaggaggttggagaaaatcctgtgcacgcagagtcgatgggattggagaggagaatatcatcggggggcatctcgggctggctgtccacgtctgtgtggggcccaacagccactatccttgatggatgaggcccaaggcatgggtacagagatgcccccaaaacactgaagggtctggaagagctattgcaggaggtggatctaactaagcaaaagttagatgcctgagctgtggcagctgcggttggctggccactcctgactgtgctctgagcagcctcgggggccgggctcatggcgcaggtgaaggtgcatccattacaagatgaactgcgatgacaaagagatgcctaattagatcagactgaaacatcagagaccgactgtcctgcctgcaggcacgggatgacaaaatggagagaccctggcttgtcaggtatggtccatttgaaaagctgctggctgctatgtcaatgagttagggccctcatgactaaatcatcctgggaccctaagttctgggaccccatggagagctctagtggggaagagagtgaggcctgggatgagctcatggaggtgcccatcctctctgcacgtttgctggtcaacaccaagatgaaagccgaccaaccacagacatagggggtcaccctgcaagacttgcccctgcctggaagacaccatagtgcgggattccacggctgtggagttggtggagctgggaactaggttcaggaagaagggcagagagtcggtcacagggtggcttctctgtctatgggacatggaacagagatgagtgaaatggcatccatcaccaaccatccagccctgaggcggtgcctcgatggcaccaataatgacgatcgggccaccccctccttagccgggtggttgcaagctgcaa[211 bp omitted]gaggcagaagaatcgtttgaacccgggaggcggaggttgcagtgagctgagatggagccattgcactccagcctggacaacagggcgagactccatctcaaaaagaaagaaaggaatgtccccacatctcctttgtgatgacagattatggaggaattgagggacatcctctgggaattaggggtgatgcttgctatctacactgagcattaccgaggccctgacaaggagcttttcactgcgggcatgagaaatgccatcttacagtaggcacactaccaatggtgtggcacactggcgtctatcttgagtcccttcataggaatcacttgaacctgggaggcggaggttgcagtgagccaagatcgtgccactgcactccagcctggaccacagagtgagactccgtctcagaaaaaaaaaaaaaaggcaaaaaaccaagaatgcatccaggaggcaaggtggcttacgcctgtaatcccagcactttgggaggctgaggtgggcagatcacgaggtgaggagttcgagaccagcctgaccaacatggtgaaaccctgtctctaccaaaaataccaaaagttagctgggcacctgtaatcccagctactctggaggctgaggcaggagaatcgcttgaacccgggaggtagaggttgcagtgagccgagatcgtgccactgcactccagcctggtgacagagtgagactccatctcaaaaacaaaacgaaacaaaaaaacaagaatgtacaggctgttcccagcggatactggagctgaatgcactctcgtatgtggtgacatccgtggttccagtggcctataacaatagatggtcggtgggggcgggggtcgtgaaagtcagacaggttgagctagtattacaagttaggagactgctgcccaaaccctatttagtatacagagctcctatcccagattacatcttgggaagggctgtctcatcaggactgtgaccctctgaattgcgactgagttaggatggtgaggcgcgtgatcaaggggaatgcgaaatggacaccagcacagct[138 bp omitted]acggtgaaaccctgtctctactaaaagatacaaaaaattaaccgggcgcggtggcgggtgcctgtagtcccagctactccggaggctgaggcaggagaatggcgcgaacccgggaggcggagcttgcagtgagctgagatcgtgccactgcactccagcctgggcgacagagcaagactccgtctcaaaaaaaaaaaaaaaaaagaaaagaaaaaagaaacgacaacacctgccaggaggtcatgatgagatcatagggactgaaaaggaaagaagtctgggtagacattataagaccagtgaacagcccatacaatagccctgcatggcccatgtggatgcctgatgggacacggagaatgacatattactgggagttcaacaaagccgtccccctaatgtatgcagctgttctcatatcgcctcctttcttatgaggataagagagggactgcacgcacctcattttgtcattgcattcacctggtatattagtccgttttcaagctgctataaagaactgcccaaaactaggtaattcataagggaaagaggtttaattgacttacagttcagcatagctggggaggcctcaggaagcttacgatcacagcagaaggcaaaggggaagaaaggcaccctcttcacgaggccgggcgaaggggggaagagccccttataaaaccatcagatctcgcgagatctcactccctgccacgagaacagcatgggggaaaccgccccaatgattcaattacctccacctggtgtctctgacacgtggggattatagagatttcaactcaagacgagatttggatggggacacaaagcctaaccctagctgggcgtggtggcgggcgcctgtaatcccagctgctcaggaggctgaggcaggagaatggtgtgaacctgggaggcgaaagttgcagtgagccgagaccacgccattgcactccagcctgggcaacagaacgagactccctctcaaaaaaaaagcctaaccttttcacctgggaaggagaacaatatacctttactgtcttgccgcggggatatttccatagcctcactatctgtcaacgcctagtggccacagacctcagtagatggactaccctggagagggtacatgttttcctttacattgatgttaaattctgagtcttttgccagctaacttctgagtctctatagccctcaccttgctgtctcacttggttaacagaggatgggcggtcaatgcagacaaaggcagggtccaggcttatcagtccaatacttggtgtcatctggttgggtaagactaacggtgttcaatttgccattctacatatggtgcaggcctacccacatcctacaccaccaaagtggctgcaaaccttcttagttcttctaaggccgtggtgtccttttatttcccatttggctcaactccttaggccactgtaccacttagtcaagaagggggccaactgggaccagtggcaaaggcaaggacacaaacttgtacctttaggattctggttccagctatggaaggggactgaagttacagtgtcagggagctataattctgcactacgtgttatgccttacagcaagtggaagatgttccaaaggggttcccatgctagtacatacccagtaccccatagtaggttagctgggattacaggtgcccgccaccacgcccacctaatttttgtatttttagtagagacagggttttgccatgttggccaggctggtctcaaactcctgacctcaggtgatccgcccaccttggcctcccaaaatgttgggattacaggcgtaagccgccacgcccagccagcctgtgcattcttaggtgaccaatatatagttagctagctctatatgtggccgccagtctccagacactcagccaccattgctcttatcgggatcctgaggccttagcctttatcctagtcgaaagtaggacaccttccagaaaccaaaatctgggaatgcccagaaacagattgtggccaaatggcacgcatgcctgcaacagaggagtacacgaactagcacagggttccgtttgctgcttggccctgtcacctatgtgacagctgaaggacagtctttgacaaggcactgagcctccacatattccctcctttatataagagggacaggccccaattcctgaccaggcctggtacacagatggcttgtcacgaggcaatccttccacctgtatccagctgtccactgagagtatctggctcgatacaggcaaaggacatgtagccaatgggctgagctgcctggatggtttcttctaggagccggacccaacagtcctgtgcactgacatctgggcaccatctttaaggggcccaccatgtgcctactacaaggagaaacacaggattggatggtagcaggcagccccctttggggggctgatatagaagaacattctccactgcacctgggggatgcatgtaacagtctagcgtctggatgcccacactgcataatatccctattgtcttactccagcctcatgtgacactttgtagagagggggccaacctatttggtattgcaaaccaagcaccaggccactctcggggtgatgctgtctcagaaggacacaacttcctgtttcttgtaaaatgaccatgaggctgggtgcagtggtacatgcctgtaatcccagcactttggaaggccgaggtgggtggatcacctgaggccagcagtttgagaccaacctggccaatatggcaaaacgccacctgtactaaaaacaaaaaattagctgggcatgatggcgggcgcctataatcccagctacttgggaggctgaggcaggagaatcgcttgaacccaggaggcggaggttgcagtgagccgagatccagctactgcactccagcctgggcaacaagagtgaaactctgtctcaaaaagaaaaaaatgaccatgacttgccccttcttgtactcactaaacatctcacttttcacccatagatggtatgcagcaaacctcttgccagctgagcacagacggtggtctctctccagaacaaaacagactgttgggtctgcagagagctgcccctctcctccactgcgggcctgccgtggtgcctcgcagcagttaacctgagtacctgaagccacttttatattcattattttttctgttgtagtttgtattgctgctgtggtgtctggctgcaatgctcctccgcatacctggccccagggaaatggtggaagaacggtacaagaatgtgagggccattcaaaggtatgctagagtggccaggtcgcagtggctcacgcctgtaaacccagcattttgggagggccgaggcatgtggatcacttgaggtcaggagttcaagacaagcctggccaacatggtgaaaccccatctctactaaaaatacaaaaattagccaggtgtggtggcacatacctgtaatcccagctactcaggaggctgaggcaggagaatcacttgaacctgggaggcggaggttgcagtgagccaagatcgcaccactgcactctagccttggcgacagagtgagactccgtctcagaaaaatgaaaaacaaaaacaaaaaaaacacagcaaggtgggtatgctggagtgagggtatatggtagacgcacctggcagcaataacttaagcacaccctgaggataagggctgccgcatggaggttgctgggggagggtgctgagtgaaagtgccatataaactgcatgcattttgcaagtgggtgtggttctcctgtccagctcatcaccactggatcaccctgtaagttatctcaaataaaccctatttctcgtttgctagccctgggtctcttcttcagcctcttgaacgtggcgccatccctattgaagcgtcccgcatgtcagggatgcaaattagaaagcagaattaggccaggtgcagtggctcacgcgctttgggaggctgaggcgggcggatcccttgaggccaggagttcgagcccagcctggccaacatggcaaaacccctatctctactagaaatacaaaaattagctgggcacagtggtgtgcgcctataatcccagctacttgggaggctgagacataagaatcgcgtgagcccaggaggtagaggttgcagtaagccgagatcgtgccactgcactccagcttgggcaacagagcgagactgtctcaaaaaaaagaaaaaaaaaaggctgggtgcaggggctcacgcctgtaatcctagcactttgggaggccaaaatgggcagatcatgaggtcaggagttcgagaccagcaactctcgagacagggctacatgtgactctcgagactgtctcgagactgtctagagacagggcaacatggtgaaaccctgtctctactaaaaatacaaaaatagctgggcgtggtggtgcacccctgtaatcccagctactcagaaggctgaggcaggagaattgcttgaacctaggaggcagagtttgcagtgagccaagaccgagacactgtactccagcctgggcaacagagcaaggctctgtcaaaaaagaaagaaagaaagagagagagagagagagagagagagagagagagggaaacacactaagagagaaataaaatattttttctttctttctttgagatggtaagcccctacttttcaatccccctctcccaagttccacctccaaaactggaccggggatggtggggaggtaggtgggaggggccttgaggcagaagggaggatgagtgccctggttcccaaaagggaggaggttgaagacccagactatttgatgagaaggaggagcccaccgccttctctctcccatccccacattacccgattcaatagtgcaagtcttcaagcagatagagcatttggaatttggggggtggatgggctggcctaatagggcacaggagccaatgggtgatgacacagaggtgcacgcccctccagccctcctatcttcaagcttgaagagccagacttcagaggtctggaaacttcagatgcctctgctctttcctttctgcagatccacctcttgagtcctgcctgccaatggttgggggtgtcttcttttcctttatcactgaaacttacccgtgggctctaagcaatctaaaagcctgagatctctgagcatttaagggaaacccattccctggatctttgggaatcccaatcacctctgtccacagcccccatccccagcaggtaactgacaggccccccagtctccttttggggagtacttcagcaccctcatggcactaccctcccacaagttcttaaagacccactcagtgatcatccactgggcaagttcagttgatttgaccctgggataaaaaccagtggtgcccagtactgagcagaaatgggactcttggtgagctcagtgaaacagcttgttagtaactggttgtggcactgatttacagatgtactcagtccacaacacaatgttcaaaccttgagtgcaacctctttttagaaataattttagacctataataggattatcatgtatcagtagcaagcacattaatatcttccccatctttgttgaagtcaccatttcccaggtttcccttggctaaaggccagcccgtggataatgcaagcctggtaatctagtatctgagtttgccagagcaaggggagggcaggaactcagggctggacatttagctttagaaagactgtgatatggtttggctgtgtccccatttaaatctcaacttcagttgtatcttccagaattcccatgtgttgtgggaggaacccagggggaggtaattgaatcatgggggctggtcttttccatgctgtctcatgataatgaataaatctcatgagatctgatgggtctatcagggatttccacttttgcttcattttctctcttgccaccaccatgtaagaagtgcctttcacctcccgccaggattctgaggcctccccagccatgtggaactgtaagtccaattaaacctttttgttcccagtttcaggtatgtatttatcagcagcatgaaaactaatacagtaaactggtaccagtagagtggggtgttgctgaaaagatacccaacaatatggaagcaactttggaactgggtaacaggcagaggttggaacagtttggagggctcagaagaagacaggaaaatgtgggaaagtttggaacctcctgaagacctactgaatggttttgacaaaaatgctgatatgaacaataaggtccaggctgaggtggtctcagatggagatgaggaacttgttgggtactggagcaaagatgactctttattatgttttagcaaagtgactagtggcatcttgcccctgccctagagatttgtggaactttgaacttgagagagatgatttagtgtatctggcagaagaaatttctaagcagcaaagtattcagaaggtgacttgcgtgctgttaaaagcattccgttttaaaagggaaacagcataaaagttcagaaaatttgcagcctgatgatgcagtggaaaagaaaaatccatttttgaggagaaattcaagccagctgcagaaatttgcatgagtagcaaggagcctaatgttaatcccttagaccatggggaaaatgtctccaggccatatcagagacattcatggcagcccctcccatcacaggcccagaggcccaggaggaaaaagtggttttgtgggccaggcccagggtccccatgcagtgtgcagcctagggacttggtgccctgtgtcccagccactccagccatggctgaaaggggccaacgtacagctcgggctgtggcttcagagagtagaagccccaagccttggcagcttccacgtgatgttgagcctgcgggtgcacagaagtcaagaattgaggtttgggaacctccgcctagatctcagaagatatatggaaatgcatggatgtccaggcaaaagttttctgtaggggcagagccctcatgcagaacctctgccagggagggaaatgcagaagggaaacgtggggtcagagccctcacacagagtcagagtccctactggggcactgcctagtggagctgtgagaagagggccactgtcctccagaccccagaatggtagaaccactgacagcttgcaccctgagcttggaaaagccacactcaacaccagcccgtgaaagcagctggaagggggactgtaccctgcaaagccacgaggtggagctgcctaagaccatgggaacccaccttttgcatcagcatgacctggatgtgagatctggagtcaaaggagatcattatggagctttaaaatttgactcccctgctagattttggacttgcatgggccctgtaacccctttgttttggccaatttctctcatttggaatggctgtatttacctgataccagtacccccattgtatctaggaagtaactagcttgtttttgattttacaggctcataggtggaagggacttgccttgtctcagatgacactctggacttttggattaatgctgaaatgagttgagacattgggggactgttgggaaggcatgattgcttttgaaatgtgaggacatgagatttggaggggccaggggcagaatgatatggtttcactgtgtctccatttaaatataaacttcaattatatctcccagaattcccacgtgttatgggagggaaccaggggaggtaattgaatcatgggggctggtcttttccatcctaatctcgtgatagtgaataagtctcatgagatctaatgggtttatcaggggtttccacttttgcttcttcctcatttttttctcttgctgccatcatgtaagaaatgcctttcacctcccaccatgattgaggcctccccaaccatgtggaactgtaagtccagttaaacctctttttgttcccagtttcaggtatgtctttattagcagtgtgaaaatgaactaatacagactggaagccttgtgacaggaaaactgaacatctgagacatctataggaaaaaaagatctgcttacatccagtccttggagttccagtagactgatttattcaccaacagcattgctcctccagctccattccaggagacaggcaccccagaagtagcaggactggtagacatcactagtattgtatatgtgttgtgcatgtatgtgtgttgaggaagaggatggggaaaacaatgatggtggtcaccaggtaagatgggacccaggaagggattgcaagtccaggccccatgaacacccccaaagaatgcccctcctcttggaaataaaagtggttctggatccagggagatcaacagttgcaagctgatattaagagttgtctattggatctgttctaagggatatgttatgtgaagccaaattaatgaagttaggaagtcacattacaagttgatgggtactttgtttcatcaacttgtagaatttcttccttttgaacctctttactgggtgttagctggtgacttaggggtagggatgtggaggctgtcataggcccgtctccgctcttgggcctgaagggaatcctatgtatgcggcagtatacaaagtatgcagggatggggaggatgacaatggcaaaaagggtgatcatcaagagcagtgcccacggtgggtatggtcgaagcacctcttttgactgtggagagatgggaaaagggttcagaatatcaaaatccccaagagaaaaggaagagttgtggaggggaaggatgggtggggaaccaaagcagaaaacccatgagtcttcgggcagtaagagaatgagatgactgggttctttcacccagagtgaattgaaaggtctggcccctactcccaaaggggttctgggtcctgggggaggctcacggtgcttgagtcccaggacatgtaggtgatcggcttcatacaaagatgaaccatcatggtcacaaagatgattagcagcacaactggacacagatggggccacagccaaccaaagatgggagagatggggtggcccaacaggatcgtcaggtctgcaaggaacctggagaagggccaccagagtgtgggatgcccagttaggcctcaccaccttggaggcagggccagcccaaccttggcatctttcaaacattctattgtatctctaatctcctgtttcatctcaagtcttgtcctctctcatcttccccctagtcagtctgtcttctatcctaacccaagaaacttttccaaacacccctctcctgctcaagaactttccatgggtatccaatggcctcaggagaaaggccaagtctctttcattcatcccataaatatgagaatgtctatgatgtgccaggaactcttctaagtgctggatatccagcagtgaacaacacagataaaataaagtggcatttggcccttggtgaacttatctagtttatttcagccacctatccagtctcctttagtacatattctcaatctcaataaatatacaagtggggtcttttggtctagggtgcccatcaccctatctccacctattcatctgtccaggctctgctcaagcatcctcttctctaggccaccttccctaactctccagtcttccttaactaaccatctatgcccccggagtttccctggctacctctactatagacttaccaccgggtactgggattttctgcttatatacgtctttctctttggactctgagctctttgagaagagtatctcaatgtaagtcattcatatcccagtaccacaaggctttcctgacacaaagtctcaagaaaatgtttgttgggtgagttaataaatgagtccataagtgagcaaactgactccaagaaccactatcagatgaaaatgctgaggctttcacccctgaattataccaggaactcttctaagtgctggatatccagcactgaacacagataaaagaaagtggcatttggcccttgggaaacttatctagtttatttcagccaactatccagtctcctttagtacatattctcaatctcaataaatatacaagtggggtctcttggtctagggtgcccatcaccctatctccacctattcatctgtccaggctctgctcaagcatcctctcctctaggccaccttccccaactctccagtcttccttaactaaccatctgtgcccccggagttgccctggctacctctactatagacttacattccacagctatatcttccaggtctcactcccagattatcttgttctctttcccaggtagctctaccttccagaatcagaccacttctcttaatccacaactcttctacttttgaccaagccattcttagctctcacttgaaatattacatagctttcaccaggcggggtggctcacgcatgtaatcctagcactttgggaggctgaggcaggtgatcacgaggtcaagagttcgagaccagcctggccaacatggtgaaaccccgtctctactaagaatacaaaaattagccgggcgtggtggtgaatgcctgtaatcccagctactcagaaggctgagggaggagaattgcttgaacccgggaggcggaggttgcagtgagctgagatcgcaccactgcactccagcctgggcaacagagcaagactccatctcaaaaagaaagaaaaaaagaaatattacatagcttccaactcttatcctggcttcactcttgactcttcctggtctgttctccagacagcagccataaatacctttttaaaaaacaaatctaataatggcactcccacctgaaaatgtcattctcctactcaaaaccctccaatgcttcatctgccattctgcatacaaagctgagtcctatcgtggcttacaaaaccctacatgacttggccaccatcacttctctagccccatctcctaatatcttctattccagcctctctgacttccttgtttctcaaaaactctaggcattatgcttcctctggccttggtaatttctgtttccctgcagggagcactttactcaaaatcttgtcatgactccctccctcctatcattcaggagtctgctcacatgtcaccttatcggaagggccctccctgaagtcgtatgtgacttggtgcccacacacactcccactatgtgccatctgacctcatcctttgattcttcctatcgcctgtatttattctcaacgtttttattctttatttgctaatctggttattgtctctctagaccactaaaatgtaagctttctgagaataggaatacttcttttattcaatgcccctatccctgatgactaaaatagtgcctggcacatattcagcacccaaaatatatgtgaaaatggatgaatgaataaaaagatttcccagaagactctgaacttaagggtccctatgtcacactaggtgggttgacagtagaggcaacaaaaaaggggtcacccttccctatagtcccatgctttgtgagaacctgggcttaggacatcacctcctggccccataggcccaggatacagccatggtttcaaatacgacaacgacgatgatggggaagactatccagtagtcactcagcagtctgatgaagtagctgcctgaaggtcgagtgaagaagaggccgcacacgaacatgagcaaaaagactcccactggagaaaacatgagatctggatcaaggttagaagtcacggctgggtgacaagggctaagtagaggccatagaccagggctggtggcagacccagtggtagccgggcgagggggcttacatgtgtaatccaagcattttggggagcctaagtgggcagattccttaagcccaggagtctgagaccagccaggcaacatggtgaaagcccgtctctacaaaagctacaaaacttagccgggcgtggtgatgcacgcctatggtcccaactactggggaggctgaggtgggaggatcacttgaacccaggaggcagaagttgcagtaagccgagatcacaccactgcactccagcctgggctacagggaccctgtcccaaaaaaagagtcccagtggtgtcaggggtcagggtcattgttaggagtagggcctaggtcagagtacctatgagcagctttgtatgtttcctgaagaaagagaaggtgtcctggagtggagtaatgatgccctgcataatccctattgcgctgctcagccccatggccagcaacatcaggaagaagataaaagaccagaagacagacggaggaaggaaggacatggcttcaacaaaggacaggaatgcaaactttgggccctcgctagcctgcaaagagaacaaagaggtgttaaagtgtcattgaactaaacaataacaaaaaaatatagacaagtatacattctatcttccctggaaaactcctgaaaatccctggatcactgagaaaatcagatgtccaagctaaccccctgacatggaaaatcaatccacctagcattatccatggaaggccattccgcaaagtatagtactttgtattactgagagccacagatgattctggtgcttccgggatttttgctggtgctaataaaagctaaaatttctgttgtgctaaaggctttcaggaactctaggctcccccctcagctatgtttactgaccttaagaaactgagtctctatgttgcactcagtcacctcgcggagaaccatgcttttgatgtgctggggaaggccactgagccaggcattgtagatggaggttgggttgtaaagcaggttgacagggggcttggcatcaggaggcagtttccctaggtttatcagctttaaaagtatttcagcattcctggggatagagggttgaatcaaatcgaaccatttggcccagtaggagatagtctccttttcccttatcttcaagataaaaaaggctatcactggcttagcattactgatctgggtaagatagagcctgggatgaatcctagaaggcacccgccttcagggacgtgaattcgtttgtgtaatcctggagaatttatgaccatgggagagcctaggagaagcattttctacagtcttcttggggactctgtggtctctgctctagtgatgggatttcttatacgctgtctaccttccctctccactgagactaacgggtaagagccaactttctaaagttcctattacagcatgtccgggagcacacagactatgatcataatgtcccatggagtcgtgctgtgtggcagcaactgcttgttcgactttttgatgtgagccctgctgaccattttggcctcatatgtccctacggccctcttcacattccatgttctggccagatttaactacttaccgtgtcagggcccatcataccccatcacacacaataccaactccacccccaccaccattcttcacttggctaactcc[134 bp omitted]gaggcaggagaattgcttgaacctgggaggcagaggttgcagtgagccgagatcgcaccactgccctccagcctgggcgacagcgagactccatttcaaaaaaaaaaaaaattcagctcattgctctgtaagaactgcaatggacagcttgccaaggttcactgataaaagcaaaaggcaagcaagtagagtttgatcacattttagaaaataaaatactatatgctattccagtaataagctagagatttgaaccaattttctcatcggaaataatttaaaaggctggaagatatttttaaatcttctaacaaaataaaaatgttgacaagataataaggaattatcaggcaaacattgaagtacaggcaaagcagtggagaaaggggacttccaaagatactttgtcccaaagatgtatgccaaatacaacaaactggacctgcagtttccaattttatgacttttcagatacaaaagggggccatggaggccagatataaaacaccagagcctgcccaaaataaggatcagaatagaagttcccctcttaaatctgacacttcaaagggctacaccttcacaataaaaatgaagcagaagcttgctcctggcccttctacacaactgggaatgcaaggaaagctgtttcagaaatgatctacagatttgatgcaatcccaattaacaccatagcaggctttttattttctttttctttttttttgagatggagcctcgctctgtcgcccaggctggagtgcattggtgcgatctccgctcactgcaacctccgcctcccaggttcgagcgattctcctgcctcagcctcccaagtagctgggacaggcgtgcgccaccatgcccagctaatttttgtatttttagtagagacagggtttcatcgtgttggccaggctggtctcaaactccggacttcaggtgatctgcccgcctcagcctcccaaagtgctgggattacaggcatgaaccaccacactcagtctgggaaggtaattctaaaatttacttggagaacaaagatctacaatagtcaaaacgattttggaaaaaaaatagcacagttggagaactcatacaatctgattttaaggtttactgtaataccttagtaatcaaagcagggaggtattggtgtaaaaaaaatagacatgttaactaatgatactgagtagagcccagaaacatattgtggacaactaattgtcaacgaagataccaaggcagcttaataagaaaaggatagtcttattaacaaatagtgctagaacaactgaatatctaaatagaaaaaaatttaattttgatccttgcctcataccttatacagaaatttatgtgaaatagatatctaaacagaaaaagcaaaaactttaaaacacaggagaaaaatctttgcaatcttggccaggcgcggtggctcatgcctgtaatcccagcacttttggaggctgaggcgggcagatcacttgaggtcaggagttcgagaccagcctggccaacatggtgaaaccccatctctactaaaaatacaaaaattagccaagcgtgatggcgggcgcctgtagtcccagctacttgggagactgagacgggagaatcacttgagcctgggaggcagaggctgcagtgagccaagatcgtgccactgcactccagcctgggcaacagagtgagaccctatctcaaaaaatatatatatatttgcaactttgaggtaaacagaactgtctgaggatgtaaaaagctcaaaacatgaaagaaaattgataaattgggcatcatcaaaattatgtcttttcatcaaaaggcttcattaacgaaagacaaaccccagaatgagatataatatccacaatatgtacaactgacaaagaacttgcatttaggatatataaagaatgcttacaactcaataatttcaccgcccaaaaaaaaccctgatttttaaaatggacagtagacttgaaaagatactttacaagacaagctctgtaaaaggccaataagcactttccaaggtagccaacattagtagtcctgagaaacaggcaaattaaaatcacaatggcataccacaccacacatctgccagaatggttaaaattaaaaagcctgatgtcatcaagtattgacaaggatgtgggacaaccagaactctcataccatactagtaagaatggaaaactgatttaaaaccactttggaaacagttccacaaattcttatgaaattaaacataccgttaccacgtaacccagtgacccaatgatccttctcttaggtgtttatccaagagaaatgaaaacatatgtccatacaaggacttgtacatgaactctcaaagcagctctacttgagacagccctaaactggaaacaactcagatgcctctgagtaggagaatggatgaagaaattgtggtataatcataaaatggaataatacttaggaataaaaaggaacgaacctccaatacatccagtatcatagatgaatactaaaaacatgctaagtgaaagaagtcagatataagaatgcatatagtatgattctacttactctgaagaaaaaaaaagacaaatctaatctatgatgatagaaaacagattggtgattaattggggccaggagtgagaggaacataggtagaaaatatgagagtttctaagacctagatgatatagtaaaaaggtctaacaaatgagatgacatggccagtgagtcagagacaatatgtgaacaaacaatggctgagaatttttggaactaatgaaaaaagtaatccatagatgcaagaagccaaaagaatcccaagcaaaataaaaggaattccccattagatatattacagtgaaggtgtagagaaacaatgttaaaaggtacctgtgcattggcaaataatttatgaattaaaagtccttaaaagcacttgcaacaacaaaaattgacagataagtgggatccaattaaactgaagagcttctgcacagcaaaagaaactcaacatgaaggagagaaaatatttgcaaactatgcatccaacaatagtctaatatccagaatctatgacaaacttaagtaatttgataagcaaaaaataaataaccccatttaaaaaatgggcaaaggacatgaacagatacttctcaaaagaagatatacatgcagccaacaaatatatgaaaaaatgctcactggtgtgtttctcaccacaccaatcagaatggctattaaaaagacaaaaagcaacagatgttggtgaggctgcagaggaaagggaatgcttatacactgttgctgggaatgtaaattagttcagccactgtgggaagcagtttggagatttctcaaataacttaaaagggaactaccattcaacccagcaatcccattacagggtctatatacccaaaggaaaataaatcgttctaccaaaaagatacatgtactcatatgtttatcacagtactattcacaatagcaaagacatgaaatcaagctagatgcccaacaatggtagactggataaagaaaatgtgatacatatatactgtggaatactatactgccatgaaaaagaacaaaatcatgtcctttgcagcaatatggatgcagctggaggctattatcctaagtgaattaacataggaatagaaaacctgccgggtgtggtggctcacacctgtaatcccagcatttgggaggcagaggcaggcagatcacgaggtcaggagatcaagaccatcctggctaacacggtgaaaccccgtctctactaaaaatactaaaaaattagccgggcatggtggtgggcgcctgtagtcccagctactcgggaggctgaggcaggagaatggcgtgaacccgggaggcagaggttacagtgagccgagatcgcacctctgcagtccagcctgggcaacagagcgagactccgtctcaaaaaaaaaaaaaaagaaagctgaaagatgccagaagcgggctcatgcctgtaatcccagcattttgggaggatgaggcaaaccgatcacttgatgtcaggaattcgagaccagcctgagcaacatgaggaaactctgtctctactaaaaatataaaaattagcctggtgtggtggcatgtgcctgtagtcccagctactcaggaggctgaggcacaagaattgcttgaacctgggaggcagaggttgcagtgagccgaaagcctgggtgacagagggaggcttggtgtaaaaaaaaaaaaaaagaaagaaagaaagagaaagctgaaagatagtaggctatcttcaatgtgctaggaaaaaaaaaaaaaaaaggcactgccaagctagcaatctatatccagatacaatagatttcaaaacacagtgaaagatattttcagaaaagaaaagtag[138 bp omitted]atggtgaaaccctgtctctactaaaaatataaaaactagccgggcgtggtggtgggcacctgtaatcccagctacttgggagtctgaggcaggaaa[135 bp omitted]ccaggatgcaagatagaataaagatcaaagaaagcaataaataggaagtagtacatctaattgaacattaactatataataaaacaataatatctttgcattttagcaaaataatatgaaataaaaatacatgaggtgcatgcttgtaatcccagctactcgagaggctgaggcaggagaatcacttgaacccaggaggcaaaggatgcagtgagctgagattgcaccactgctctccagcctgggtgacaaagtaagactccgtctcaaaacaaaacaaaaacatgatataacattcaaatgtaagttaggaatgcatgtaaatggatataaagagttttggagcccttatcttgaaagacagtgaagtactgattacctttagacatcgataaattaagaatgcatattgtgaattctggggaaatcactaaatcactgaaagaacagaaaacagagtggataacttccagactagtggaggaaaaaaaaaatggaatgataaataactactaagtcaatccaaaagaaggcaagaaaagagaaaaaacaaaatacagaccaggagaaacaaatagcaaagtaagatgggagacagagccaattatttcctatcatgatggcagagaaagggatccagcctccctttctctataaagagcaacaatttggcaactatccttgaacaacaattactctgggccgggcgcggtggctcatgcctgtaatcccagcactttgggaggttgaggcgggaggatcacttgaggtcaggagttcgagaccagcctggccaacgtggggaaaccccgtctctacaaaaaatacaaaaattagctgggcatggtggcacgttcctgtaatcccatctacttgggaggctgagacaggagaattgcttgattccgggaggcggaagttgcgtgagccgagatcaggccactgcactccagcctggaagtcagcgagactccatctcaaaaataaataaataaataaaataaaataaaaattactctggaagaattgagaagtcggcttcagctgacttttagtgggagaaagaaccctagaaaaacccatacagaaagggtggaaagaacaattccattttgcccacatcaccccatcccccgagccagcactgctcagcatggagagggaattccctggctcgcataaccctctttcagggataatgagagcaggctataccaccagcttccctagtgttttgggacactgcccaaccagcttcagtttcactccattcacatttccgtggggactggcattgccgagacttacggagataatggggaaccaagaagtgggacaggctgtcagtatcagccatgctggtgggagccacagcgccccctagtggcctgctcaacacgggtctctagcacacttctgtactgaggacctcaacagcactcctggccactgtgcagctccccacagttttcaccaccaaggacaccttggtgttaccaatggctgatgccagcaccattttctgcagaggaaccaagcagctttcacagctgaggaaaccaactgccagcactgcagcagcaaaagccctgtagttttttccaccttcacagtctccaggtgcctggccctctaatttctccttcctctgtccctgaaaccacctaagctgttcaataccatggtcacccagaccagacccagggactcaccccagtggccatcgcattctctgggtgcctaagccaatacccctcctctatggagtcaccccagctgctgcctctacaagtgctctgagccaaggacccagcacagctaccatgcatgtgcctgcacacagccatgcctccccatccccaggttctaactccagcatcacgtttgcaccctcagctaggccccgcggctgcatgtgcacacacgcctccagctcagccctgcaactgcccacgtacatgcagatggactgacctctgtggccagactgcagcaggcccctgcagttaggcacaagctgtcaggccccactgccacatgcatgcccttagtcaaccccagcccctgcctctgactccaccccttgccaccattaatgagcctgcaactagcctctgctgccatgcttgtgcctacagccagcctctgcagcagagtgtgtgcacaccactgaccccagcctccactgctgcgagtcctggcccctagatgctaggcaagaggcacagctgaggtcccagaaaactctgtgggaggttcacagccactgtggacctcccacagctgttgccaccaaggaccatgcaggtatcaacatcacagcccccagctgcctgtgctaacaagactctgtgtccctccaacctggacccaccacacgcacccccacccacagttggcactctgtgccactggacccagtgccagagagcaccactcttctccccaaaaaaagcatttgaagttaatgcttcttcaaatgcttttctcaagactataaaaatcatgaagaattggagaatcatgataacaccaaaggaaaacaataaacttccattagctgactccaaagaatagcagatccactaattgcctgacaaagaattcacaataatggttctaaagaatctcagtcaattataaaagaacagagaaaacaatttaacaaaatcaggaaaacaatagaacaacgaaagaagaggctaaacaaaggcactgaaaatatgaaaaagaaccaaacaaacatttttgagctgaagaataacaataaacaaaaaatacaatagatggcttcaacagctgactagaaaagcagaagaaagaataagcaaattcaaagacatcattttaaatcatccagtcagaggagaaaaagaaaaagaaatgaagataaccaaagaaagtctacaatatctatgggaggccatcaagagaacacttacataacaagatttacagaggagaagagaaaaggacaaagtttatctttaaaaatagctgaatacttccctaatctggagaaagatacaaacatccaggtacaagaagttcagaggtctctaataaaattcaacccaaagaagagttcattgagacatattataaacaaattatttaaaactgaagacaaagaattctgaaagcagaaagagaaaagcatatcacatataagggagccccagtacaagtatcgacacatttctcaacagaaatcttgcagtccaggagagagtaagatgatatattcaaagtgctgaaaaaaaatctgacaaccaagaatactttaaaaagtatgtaggccgggcagggtggctcatgcctgtaataccagcactttgggaagccaaggcaggcggatcatgaggccaggagttcaagaccagcctggccagtatagggtttagtagaaaccctgtctctactaagaatacaaaaattggctgggcatggtggcgcccacctgtagtcccagctacttgggaggctgaggcaggaggattgtttgaacccgggaggcagaggttgcagtgagctgagatcacgccactgcactccagcctgagtgacagtgtgagactgtctcaaaaaaaaaaaaagaaaaaagaaaaaagaaaaaaagccacaccattagaactggtctcatctaacgcccttcagtcatttgatttatacaagtgataaggtttggggcacaaaactattatcatattactattaattttactttatatttgccctttttaaaactttgtatctgtcacttgttaaatttttacagaagtacaactcctaacaaaataatgctggcccagccaaacactttgagatgataacaaaagactatggaacagacaaaattgaacttcataatggacctcagatagacttagcctaagagatacccccttcaaatgtcccttgttgctcaaatgtggctacaagagtttgacactgactccaagtcacccatcattcccctcaatgtgacatgagaccagcaactgggacaggcccatcatgacattgagggacaggaaaacccaaatatgaatgattgatcagtgatgcttttggagaaagatcttgattaaaagaggaaatgtgaacgttatcagaataaaatggagtcactaatgttaagaaagccctagcaaattgagtcaaggaaggccataaagagagggttctcacacttgtatgtctgattagaaaaacaactacaaaaactataaccacgcataaaggccactgcaaccttacacacacaaaatattcctgcagaaacatctgcccaacaaacgcctatccaatcttggactggtgtcacccttgttatcgatctctgtagtcaaggaaaattatttcaaaacaattatgttatcctcctcatttttttcctttaaaaacctttgttggctgggcgtggtggctcaagcctgtaatctcagcacttcgggaggctgaggtgggcggatcacctgaggtcgaaagttcgagaccagcctgaccaacatggagaaaccccgtctctactaaaaatacaaaattagccaggcgtggtggcacatgcctgtaatcccagctactcgggaggctaaggcaggagaatcgcttgaacctgggatgttcaatgcactccaccaggtgagagaaaagaattttaatatatacaactggaaaatgactacatatccagaacatataaagaactccatagaaaaagatagatcatccaatattttttttaaaatgggcaaaaatgaacttgaccacacattttgctttaaactatgacaatacaagtatttgcacgagtgaggtaatgagaacttccatacacacatttcatatacatacaattataaattggcacagatactatggaaagtaatttggcatcatctgtgaagttgtagatatatgtggtagattgaataaatacagccacaatattttggagctcctccaattaagaggtaaagtctatttttcacctttggaatctggggtagcttttttacttccttcaaccaagaaatgtagcagcaatggaagcagtcctatacttcgcttcaagacactttgctgagtctgcctttgtgctctgtgagctaccatgtgaagaagaccaaactagccccatggagaggcctcatggaagagagcagcccttgctggccagccaactgactacaaacag[223 bp omitted]gaggcgggagaatcgcttgaacccgggaggcggaggttgcagtgagccgagattgcaccattacgctccagcctgggtgacaaaagcaaagatctgtctcaaaaaaaaaaaaaaaaaagaagaagaagagcagtgagcagcgccgtccctgctgggctcagcccccagccaaccctccagctaaatgcagccatgtcagtgaacccatacaagcccagcagaagagctttccagccaacccgcagaatcatgagataaatcattgttgttttaatccatttacttccagagtgatttgttacccaagaatagacaactatgccccaacaatctaactcatatcccagaaaaatgtgcacatatgtagtacatcaggaacatgcataagaatgtttgcagcaacattgttttaatagcataaaactggaaagactccaaatgttatcaatagttgaatggatttttaaaaactgtggtatattcatatactgaaaca[134 bp omitted]cctgtctctgctaaaaatacaaaaaattagccaggcatggtcgtgggcacctgtaatcccagctacttgggaggctgaggcaagagaatggtgtgaacccaggaggcagaggttgcagtgagccgagatcacaccactgcactccagcctgggcaacagagcgagagtctgtctcaaaaaaaaaaagaaaaagaaagagcacagattaaagttatacacaatatggataaatattgcaaacatgttggatgagaaaaagaaagcacaaaagtaagcaaagagaatgtatatatgagggaacaaataactaaacatattgctttatataagtggacaaattatattgcttagctatgcatacatagatgatagaatataaagaaaaacattaatcactatccttagttctttgttttttttttttcttttttttttttttgagagagagtctcactctgttgcccaggtggaatgcagtggcacaatctcagctcactgcagcctccacctcccaggttcaagcaattctcctgctttggcctcctgagtagctgggactacaggtgtgtgccaccacgcccggctaatttttgtatttgttagtagagatggggtttcaccatattggccaggctggtctcaaactcctgacctcgtgatccatctgcctcagcctcccaaagtgctgggattataggcatgagccaccgcacccggcttgtttttctttacatttgatcatctatgtatgcgtatctactaagcaatatagtaaccactatcctgacttttatgatggttacctctgggaggcagtaaagagattatgattagaaaaagatacacagagagcatctagggttattctagttcttaatacaggtgatgtttacttcacggttcgttacacagtgcattgttttatacactttttttttttttttgttagaggaagggtctcgcccagctgatttcaaactcctgggttcaagcaatcctcccacctcagcctccctaagagctggcattacaggcgtgagccactgctcccggccttgttttatgcatttttccatatgtaggtaatagctcataataaaaggtttttttgaaaatacacaaaaaaactaccattacactcccaccagactggaaacaatttaaaagtccaaccaagtttaatcaagtgttgtgcaaaaagtagaacaaatggaagtctcacacatccctgatgggagggcaatgcattacgccactttgaaaaccagacaatatatgataaaattgaaggggagcacaccctactcagcaattcctttcctaactatatgctgtcaagaactcttgcacacgcacacatgtatattcccaggcatcttctagaagaaaatggtggttatttgtgagggttagggttactaggagaggtcgggcgcggtggctcacgcctgtaatcccagctctttgggaggcagaggcaggaggatggcttgagcccaggagttcaagacctgcctgagcaatatagtgggaccctgttctcaaaaatttaaattaaaaaaaaaaaatctgctgggagagagaggaagaggaggaggaagcaaaaaaaaagaaaaagaaaaaaaagaaaaagaaaaaaaaaagattactgggagaaattcaactcagggttgcctcctctggaaggccccatctgactagtccagacagaattaatggctctgtctcctgtcctcacccatcacttcagttaccagttagcacaagtttttggctgtctcattctcctttccttccccctccaaaattgaaaacttaatgaaacaaggactgtggtctgattcacctgtccaagtctctgttgtatagaaagaacacttcctaaatgtctgtctgatggatgtttttggaattaatgcctaaaaataagaaaaataagaaacaggggtgatcagacaatcaaggttctagtacagagaatccttttggagtttctgctagattgacagaaatccccaattcaggagttaacagttaagaatgggggccttagggcgcggtggctcacgcctgtaatcgcagcactttgggaggctgaggcgggcggattatgaggtcgggagatcgagaccatcctggctaacatggtgaaaccctgtctttactaaaaatacaaaaaaattagccgggcctggtgatgggcacctgtagtcccagctactcaggaggctgaggcaggagaatggcttgaacccaggaggcagagcttgcagtgagccaagttcgcgccactgcactccagcctgggtgaaagagcgagactccatctcaaaaaataaaaataaaataaaataatgggggccttctacttctccatttttccaaggatggccttggaagtctctgtgtggtatggtcttggatggtattttgttgtgtatctgggattagagaagccttcaatgtttgcaatttttagtacatccctgttagcatatccactctgaggtggatagctggcaatctctgagtttgaagatttatttctagggtgacaaaaggctctgagaaggataatatatgataggagattctattgtctccatttttagctatggggaaggtagagggcttgcaagtgcacccaaggttgaaatgtgtgaacatgggtctttgcagcacctttaaggttagggtctcagggttttaaagttccctggagctgagacccttaacaaaggggccggccttacctctcacagcagcgatgtgtgatgactgtcgcccagaagcccaggacacagaagttgaaagatgtgaaaaccaacaaagtgagcaggtttatcacagacacgagaaaggcatcactgagacagttgttggactggggcatgtaggaggctaaggaggcaacggagccaaggcctatgcctgtgttagacaaaacttgaccccctgctagagaccacacactcatattgtacacatccgatatctaaaagagagaagacaagcataagggggttgtaaaagaagaagcagaggacaactataatagaaatgttgcagggaggagagagggagatacaaaagtaaagaatggggaaaggaagctctaagaataggcagctgtggtgccctacaaggcctgacgggggagtgaggagatagatttcaccttggcaaccaccaactgttgaaggccaaattttgccccttccaggagtagagtccggatgaagaaaccgacaatgatgaaacaggggagcagtaccaagacatagattacctgaatcgagagtgggacatatcagcaaccgtgtaccagtaggggtcaaccaacagttaggagggatcaaaagttctgagtcagaaatgagtaggagttagaagaaagccttcagcaagagtcaggggctaggggagtaaaagccaaaggagtaagagattaggagatcaacaagtaacaaattgaggtaagggctaaagcatctgagaatttcaaggaatccaatactggtggctcaccttcccagtggacttgagcccattgatcatgaaagcaccaacaagacaccagcaaagaaagaagggcaggaccagactgtagactggtgacccgccatcctcgattctgtctgaggccttcaaggcctgctggtaccagaagtatatggagggtgttgtccgttcacattcaggatctggggggacctggctttagacatgcctgctagacaaggtaccccctcttcttccttatcccctcccccacctcccttttctctttccctctcccatttctttttccttcttcttcctcttccttgtccctccccactctctcctattccaaattcccttctacttctacttctccatttttcccttctcctcttctttcacttcctcctcaccaaagccactagagttcatcgttaagggacatttctcccatggaacgggaaactggaaggactggctcatgtagaagatgatccaggaattgaccacattgaagtacaggccgaggatgaagcacacctgggggccaaggaggatatggctggggaggaagagcagggacaggaaaagggaggggatttgacagaggattggggaaccaaagggatctgacccatggaggtattcacagggcgcatttcaggaggagggttgggatggcggtggggtgtaaaagtcaggcctgggcagccatgggctcctcaccatgaagctagaataccccacaccaccaatccagggggcaatgatcttccatacacccatgccaccctgacgcatgctctgaccagctgccatctccaggaagagaagaggaaccccgaccaggaacagcatgaagatgtagatggcagcgaaactgcctgtgaagaagattcagaagggactctgagaaccatgtggcctttcagtgcctggactccaggagcccaggaaaacattctccctaccagcgacctcttccagggccacaggcatcagggctcacccatgtctacatccctcacggtcccaagtgtccagtcctctggcccccaaatcctggaagacccaagtacctagtttccagcccatcttgggcccaggcctccagctttgccatccccatgttcagataccctgaacctctcatgatcctaagtgtccagggacctggctcctatcctgctcagagcaccaggtctttagtctctacatatctcagaaacattcatggttaaagcctggacaggactctgtcctgattgccccttgtggacccaggtttcctggtccccagacttacagcctccactgttaagccacaggtaggcaaagcgccagagacaagatggcttcatagagaagcccacctgagccagaatatactcagttttgctggaccagaacggacgggcaaggaggacctcactctctttcttctctgtcatctgcaccttctcatgcgtgggtttctggttcagggctgaggcagttaacgcctccaatacagaaatttgcttgggctgactggtcctggcctgagcctctgcaacccgggctgctgaaacttgggcctctgaggtccaagatgttgcagaccgggtcaatgaacccttgtcttcccacgtttgacttcctgggacactgtcagaaatcactgtgccagtccatgaggtgtttgccagcaaggatgtcgaaggctgggcctctgtcttcatctcacacagactctctggggcagctcccgcttctgcaagggagggttcatcttcctgaggagacctgaaggacaccaaaatctgtagattttagattttagagtcaagtaactactgagttacaaaacaatcctcaacatctccttaaagcaaattttataccaccactgacatttaaagcacaaaaaaatctcttgcataagtttcacttcttagaaatgttttcacgtggtggctcacgctgtaatcccagcactttgggaggccg[134 bp omitted]gaggcaggagaatcgcttgaacccaggaggcgtaggttgcagtgagccgagatcaggccactgcactccagcttgggagacagagtaaggctccatctcaaaaaaaaaagaaaaaaaaaaaagaaatgttttcttgtacaggatagggatagagacagacatacccaagagtcaggaatccctgaaatcaaaggatttcttttttttttttccagctactgggttcaagcgattctcctgactcagcctcccaagtagctgggattacaggcgcccactaccacacctgactaatttttgtatttttagtagagccaggttggtcttgaactcctgacctcaagtgatccgcccacctcagcctcccaaagtgctggaattacaggtgtgagccactgcacccagcctgaaataaaaggatttctaagaacactgaagtactatttacagagggcttctgaatttaaaaacaaaactaaactaaactaaactaatttaatactaaatctgccttgtaaccttagaaaagttactttacctttctgagctttctaatctgtaaaacactcagatctctgctcaaatatagcctcaccagagatgccttccctgtccacctatctaaaatagcagctacctacccacaactctctttacttcatggcatttctcatctcctgactttattatctattgattgttaatttattcattgtccatctctgcctactgctctatctccagcaaaaggatggtgttctacctcacatctagggctattctcctccttattctccaagttcccgccactctgaacttctgttggctcttcaaatacaagagaaaaggcaaggagtgtgctgaaaaaaaaaaagttacatgaaagagaggaagagagaggggaaactggagttttctttcagtgggggaaggagcatgctttccaaaagcagaggcagtagatgggcttcaaggcagcactggcacatttgggtgacatggataactgcttgtgagacacagcttccaaagagctctttgttacacaagaaaatgcttataattcaattacaggttaaaaacataagactaagatacaaatttctatctttagttctatctctactacatttaaaaatgcaatgaaaggctgaaaggaaatacatcaatatacagaagatgatcaggccaggcgcagtggctcacgcctgtaatctgagctactcaggaggctgaggcaggaggatcgtttgaacacaggaggcggaggttgcaatgagccgagatcgcacgactgcactccagcctgggcaaccctgtctcaaaaaaaaaaaaaaaaaaaaaaagacgatgatggctacaaatatgtttatatccttatccctgcttttacattaaattttttaaaatcttgtattacttttttttcagacacaggttctcactctgtcacccaggctggaatgcagtggcatgatccacagttcactgcagccttgaactcctgggttcaaaggatcctctcaccttatcctccaaagtacctaggactataggcatgtgccaccatactcagctaatttttaaaagtttttttcaagatgggagtctcactatgatgctcaggctggcctcgaactcctgtgctcaagtgagtctccggtctcagcctccagagtaggtggcattacaggcacaagccaccattccccactcacctgtattactttaataatcaataaaaatacggccaggcatggtgattcatgcctgtaatcccagtactttgggaggccaaggcaggcggatcacttgaggtcaggagtttgagaccagcctggccaacatggcaaaaccctatctctactaaaaatgcaaaaaaaaaaaaaaaaaaaaaatagccggacatggtggcaggcacctgtaatcctagttactagggaggctgacttaggagaatcacttgaatcgggaggcagaggttacagtaagccaagatcataccactgtactccagcctaggtgacagagtaagactctgtctcaaaaaaataataataatcagccgggcacagtggc[131 bp omitted]gtggcgggcgcctgtagtcccagctactcaggaggctgaagcaggagaatggcgtgaacctgggaagcggagtttgcagtgagctgagatcacgccactacactccagcctgggcaacagagtgagactccgtctcaaaaaaaaaaaaatcataatcataatcataatcataatcaagaaaaaatatgtattgataagtgaaaataaaaagatcataatggacaaagaaatccaattgaagaagctctcatcagcgaaatctggacaaatcagaacatcaaaataaagaatagtaacagatgagaaccaacagactaaaacaagaatccatgaatccacagggatacaactcaggaaaaggaaaacctcttccttatagtagaatacaaactaataaatgtacaaggaacgatgaattagaaggtcactgcttatcataaactaatcaagttgtacacatgaaatatgtacagttttttacttgtcaatcatccctcaataaatatgtctttttaacaaatcattgtttggaaattaccagagtaataactgacacaagcaagaatcatcaatggttgctaaaacaagatgatgaaaatttgatggggacaggataattgcatagtattactgtatctccccacaagatattccccccaaaaaaacccaagaaactagtatctttagagtattacacactacctaaaccaataatagtcacctgatatcatataactcctgatacaatgcattaagagcacaacatcatttctgtgggattcctgccaaaaacatgtaacaaaactccaatcgtgaggaaacaccagaaaacaaatctaaattgaagtacattctgtaaaatagctggcctgtgctcagtaaaaatgtcacagtcaataaagacaaggaaagatggaagtgttgtaagtctgaaattatgtcaaaattttgttaaattttttaaacttccaagcacctgccactcctacaattcaccatcaaaacaaaaggaagtttcttctaagatagccacatgaacaccaatctccaaacttacccacaatctccccctacccaacaaaaaaaaaaaccaatgattttaaaatattacaaatatggggatatctgcatcatttctgaaaaataggttccatcctcatgtcaaaaacagagaaacttctgctacataaacaagaaacaggaccaaactgtaatcactgaggagtcagttcacatctctttttcctgatgaagtggttcagtgtttcaggaagtaagtaaatactttcccagcaacttgtgggaaataaaaacaatcacttgccaaagaccttctgctccagtgaaccaacagcttccagaagctgtatgccagagaatgcaacagcaggtgggccactcctctgttattggatttattggagttattggtgggttgatgggcgtctccctgagacaaatgatgcttccataacattaagagagaagcagaaaatcatgcagggaagaaaaggctgaagaaaaaattaggtacaaaaatccagcctttggggctggtcatggtggctcatgcctgtaatcccagccctttgggaggctgaggcaggagatgttttatgtaagcttcgtggtaactacaaagcaaaaaactcagtagagatgattcaaagcataccactagagaaaatcaatataattagtcacattgatataataaagaagaaaaatattatcatctcaagagatataggaaaaacatacaatacaatgatgatttacggagaaaaacttttagcaaaccaggaataatttccctaacctgataaatggtgtctctcaaaaaaaaaagattatacttaatagtgaacatatgcttaaacataggcacatatttaataatgaagtgaagaaagcttgccttttgaaatcaagaacaatcaatgaaaccagctatcagcacttccttcccattgcattaaatattttagacaacacaggaaagcaaggggaataaaagacaaagattaaacaaaactcactattcacagatgatatatctatgtggaagatccagaatactacagataaattatttaaattaataagataatttagcaagattgttggatgcaaacagcaataaatgaaaattatttatatgtctatgcttgcaatacataattagaaaataaaattttaaaataataatgccacttataaaataattttttaaatatagagtaaaatcctgggaaggtaatggcaataacagcaacattgttttaaaatcttcccaaatactcacatgaaaacaagtagttctactagattgcaagcccaaaatccatggataatatttacaatatcaagataaaccccaaaagacaagtctatgagaacaaaccacaagagccacagacctgtatagaatcagcatctgtgtgggaggaaacaaaggaagcaagagagcatctgacagacctggggatgggggacagggaaaccagtctctcaaaataatcaacaggtactcaccagaaatcatgggaaggctattagagaacagcagctaaaactagaagatgtcttgcctaatccaataacagttgagtgcatggagtcaacaatagaaactgaagggaccagggcagactagattctatgaactcttaaaattaaccaaccagggatcttttccaacccagaggccacaatgaggagaaattcctgtgagtaaagccaaattgagcaatacaagaacaagaatgatgaaggataggccagacacagtggctcatgcctgtaatcctagtactttgggaggccaaggcaggaggatcacttgaggccaggaattcaagataagccttgacaatgcagtgaaaacccatctctaccaaaaaaaaaaaaaaaaaattaaaattaaaattagccaggcatagtgggacacgccagtggtcccagctatttgggaggctaagtggagaggatcgcttgagcccaggagttcaaggttgcagtgggctatgatcacaccactgaactccagcctgagcaacagagtgggacctcattctctaaaaaaataaaataaaataggccaggtgcagtggttcatgcccgtaatcccagcactttgagaagccaaggcaggaggatcacttgaagtcaggagtttaagacaagcctggccaatatggtgaaaccccatctctaccaaaaaatacaaaaattagccaggcatggtgggacacacctgtagccccagctactcggaaggctgaggtgagataattacttgaatccaggagggggaggttgcagtgagccaagattgcaccactgcactccagcttgggcaacagagtaagaccctatctcaaaaataataacaataataataaaataaaattaattaattaaaagataattttaagaaaacatagaaatgaaggatatacaggatccagataaaaatggggagaagaaatttccacttttgaccatgaaagcaaaacagtgtctggagttacctccacaaaaacactacaaaactgtacaaataggccaggcgccgtggctcacgcctgtaatcctagcactttaggaggccgaggcgggcggaccacgaggtcaggagatcaagaccatcctggctaacatggtgaaaccccatctctactaaaaatacaaaaaattagccgggcatggtggcgggcgcctgtagtcccagctactcgggaggctgtggcaggagaatggcgtgaacccaggaggtggggcttgcagtgagcagagatcgcaccactgcactccagccagggcaacacagcgagactccgtctcaaaaaaaaaaaactgtacaaataattaaaacaactattttcacatattaaacaaaggcagtacagcattgcaatctctaaaaaaaggccagaaaacaaggtaactaattgcacgattgccccatttttctgctaatttccaaactttggcacaggaggaagaatacaaacagagcctggcagtctcagcacttgaggaggcaaaagtcagttcaggaaggcttaggtgactagaattagctgggctaagtactcaacagaagggagccacagagaaagagctctaggaatctggataaagtaccttcgagccattagctaaatatcaacctgcacatgtatagtatgaaacctcataagaacaggcaaagaataaattccaaggaaagaaaagtactggggaactacaggtaaaacaattcctagaacttggagaagaacaagaattactcaagtttccatcagccagtgtggagagactttactgaatacttggaacatttaaagtggcataaactagctctagttctagtagtaggactactttagacctgaaaaaaaaaaattcttaaaagcaacccttaaacagccaaaactgatcttcaagtaacttaactgcctgtcacaacaaaggccaacattccttaagataatacagacaaacctagcactgaacaacaaaaaattcataatgtcaaccatctagtcaaaaattactagacatgcaaaaaagcaggaaaagtgacccataatcagacaacaaaaacagaaatgatagactaatggaattaacacaccataacactaaaatagctgttacaaatatgcttaatatggtcaaggacttaaaaggaaaacatgaacagaatgaggaatataagatagctagatagctagctagctagacagacagatagatattttctcttttgagacagagtctcactctgttgcccacactgatctcagctcactgcagcctctgcctccaagtttcaagcaattctccttcctcagcctcccaagtagctggaattacaggtgtgcaccaccacaactggctattttttttttttttttttttttttagtagagacagggttttgccatgttggccaggctggtctcgaactcctgatctcatgtgatccagctaccatggcctcccaaagtgctgggattacaggcatgagcctccatgcctagccatgatatattttaaacatcaaatagaacttctagagatgatacaacacctgaaatgaaaatttcactgaagattactggcagattttaataaatcagtgaacttaaagatatagcaatagaaacaatccaaaatgaagcacaaagaaaaaaaaaagactgaaaacaattaccagagcattagtgactgtgagacaatatcaaatggcctaaaatgtgtaactggaggtccaaaataaagggaggatgggaaaatgaaaccaggccaattttccaacaagccagatgcccatagaactgaagcttgagaaacttacatttgtacaatgagatgaacctgctgtatgttgaccaagtactcttctttactcctccctaattccttcatatatgtgtgtgtgtatatatatatatttgtatatacatataaatacatatacatatacatatgtgtatatgtgtatatgtatatacatatacttatacatatatgtgtatatgtgtatatgtatatacatatacctatacgatatatacatatacatatatatatcaagaaaagactcacataattgaaaggataaaaggacagttctacaataataactggagactttaataccccactacgaacaatggacagaagcagcagacagaagataagcaaggaaatagaggacttaacacaataaaccaaccagatctaacagatgtattcagaacactctagccaacagcagcagaatacacattcttctcaagtgcacatgggacattttccaggagagaccacaaatttgtaggccacaaatttcctttttttctcaatagaattagaatgataaatatcatacaaaatatcttctccagccacaataggatgaagttagaaatgaatcacaaaagtaaaattgaaaattttacaaatttgtagaaattaaacaacacactcttaaacaaccaatggatcaaagaataaactacaaggggagttagaaaatacttacagataaatgaaaacgaaaacacacatactaaaatttatgggaggcaacaaaagcaatgccaagggggaaa[136 bp omitted]catagtgaaaccccatctctattaaaatacaaaaattagctaggcatggtggtgggcgcctgtaatcccagctactcaggaggctgaggcaggagaatcgcttgaacctaggaggcggaggttgcagtgagccgagatcacaccactgcactccagcctgggcaacagagcaagactccctctaaaaacaaacaaacaaacaaacaaaaaaaaaccagatcttgaatcaataacctaactctaaaacttaagaaactagaaaagcaaactaaacccaaagctagcagaagaaaataataaaaattaaagcagaaatgaatagagaatagaaaaacaatagagaagccaaaagttgtttctttaaaaatatcaacaaaattgacaaacctttaactagatgtactaagaaaaaaagagaagactcaaatgattaaaaccagaaatgaaaatggggacattattaccaattctacagaaatagaaggattataagagagtactatgaacttatgaacaactgtacaccaataaactggataacctagattaaatggacaaattcctagaaatacaaatctactaagactaaatcacaaacagaaaatctgaatagatctataactagtaaggagattgaattggtaatcaaaaatctctcaacaaagaaaagctctggacctgatggcttcatgggtgaattctactaaacctttaatgaattaatatcaatccttctcaaacttttccaaaaaattggagaggagggaacacttcctcattcatcctataaggccaacattgccctaataccagagccatacaaagacattataagaaaagaacactacagacctatattcattatgaactttgatgcaaaaatcctcaaaaaaaatactaccaaacctaattcagcagcatattaaaaggattatataccatgaccaagtgggatttattcctggaatgcaaggatggttctgcatacaaaaatcaatcaatataatataccacattaacaaaatgaaagaaaaataatgattctctcaactgatgcagaaaaaacatttgacaaaactcaataccctttcatgataaaaaaaaaaaaaaaaactcaacaatctaggagttaaaggaaaatacggctgggcatggtgactcatgcctgtaatcccaacactttgggaggcctgatgaccacttgaacccaggagttcaagaccagcctggggccaggtgcagtggctcacatctgtaatcccagcactttgggaggccaaggcgggtggatcacctgaggtcaggagttcaagaccagcctggctaacatggtgaaacctgatctctactaaaaatacaaaaattagtcagatgtggtggtgtgcacctgtagtcccagctacttgggaggctaaggctggagaatcgcttgaacctgggaggcagaggttgcagtgagccaagatcataccactgcactccagcctgggtgacagagcaagactccatctcaaaaacaaacaaacaaacaaacaaacaaaatttttaattacctgggtgtgttgatgtacttctgtagtcctagctactcatgaggctgagatgggagaatcacttcagcccaggaggtcaacgctacagtgagccatgatgacaccactacactccagcctgggtcacaaagtgacaccatgtctcagcaaaaaaaaaaaaaggaaaatatcccaacataatagccatatacgaaaaactcacagcaaatgtcatacttaatgataaaagactgtaagcttttcctctaagattagaaacaagcgtagaatgtctaattttgccacttttattcaacatagtactggaagtcctagccagagaaattaggcaaaaatataaataaataaaaggaaaccaaactagaaagattatatgatcttatacgtagaaaatcctaaaattttcaccaaaaaaatttttgagctaataaatgaattcagcaaagtagcaggatacaaagtcaacaatcaaaactcagttgcatttttatacactaacaatgaacaatctgaaaagaaaattatgaaaacaattccatttgtaatagcatcagaaagaataaaatacttaagaattaacttggctgggcacggtggctcaagcctgtaatcccagcactttgggaggccaaagtgggcagatcacctgaggtcaggagttcgagaccagcctgacgaacatggagaaaacccgtttccattaccaagttacccaggcatggtggcacatgcctgtaatcccagctactcaggaggctgaggcaggagaatcacttgaacctgggaggcagaggttgcagtgagccgagattgcaccattgcactccaacctgggcaacaagagtgaaactccatctcaaaaaaaaaaaaaaaaagaattaaccaagaaggtgaaagacatgtacaaagaaaactacaaaacattgctgaaaaaaattaaaggagacataaataaatggaaaaatatcccatgttcatgggttggaagacaacactgttaagatgtcagtattacccaaagcaatctacagaattagtagctttttttttttttttttttttttttttttttttttttttttttttgcagaaatagaaaaacacgtcctaaaactaacatgaaatctcaagggaccctgaacagccaaaataatcttgaaaaagaagaaaaacgctggtgtactcacatttcctgatttcaaaacatattacaaagctatagtaatcaaaatagtgtgttactcacataaagatacagaccaagggaacagaatagagggcccagaaacaatgtatggaaaaatgattttttacaagggtgccaagactactcaatgagtaaaggacagtcttttcaacaaatggtgctgggaaaactggattatgtacaggcaaaagagtaaagatggactcttacctaacaccacatacaaatacacaaaataaatcaaagacctaaatgtaacacttaaaattataaaattcttagaataaaacatacgacaaaagcttcatgatagtggatctgcaatgaattcttggatatgataccaaaggcaaaagcaacaaaagaagaaacaaacaggatttcattaaaatgttttaaatttgtgcatcaagagacactatcaaaggggtgaaaagataacccacagaatgggaggaaatatctgaaaatcatatgtataataagagattaatattcagaatatatagagaactcgtaaaactcaacaacaaagaaacaaacaacacaattcaaaaatgggcaaaagacttaaatagacatttctccaaggaagatataccaatctccaagaagtacatgaaaagatgttcaacgtcactaatcattaaggaaatgcaaatgaaaactacaatgagataatacctcgcatccattaggatggctaatataaaaaggcagaaaataagaagtgttggtgaggatgtggagaaattggaatccttgtgccttgctggtcagaatgtaaaatggtgcaaccaccatggaaaacactatggtggttcctcaaaaacttaaaaatagaattaccatatgatccagcaattccacttctgggtatacacccaaaataagtgaaaaccaagcctccagtggctcagcctgtaatcccagctctttgaaaggctgaggtggaaggattgcttgagcccagaagttcgaggctgtagtgagaggtgatcatgccactggactccagcctgggagacagagagagaccctgtctcttaaaaataataataataggctgggcacgggggttcacacctgtaatctcagcactttaggaagctgaggcgggtggatcggctgaggtcaggagctcgagaccagccaggccaacacagtgaaaccccgtttctactaaaaatacaaaaaattagctgggggtggtggcgcacgcctatagtcccagctacttgggaggctgaggcaggagaatcgcttgaacctgggaagcagaggttgcagtgagctgagatcgtgccactgcactccagcctgggtgacagagtgggactccatctcaaataaataaataaataaaaaataatagattcatgtttcttaaacacattctagaacagttgtccttaaaagcaagctttacggaagggagagaactgagttttggccagctggccacttccaacatccataaagccccttgagccccaggcggactcctcttcccatatgggtgcaaccctccatggtgcccctacaccgtcatcccaagcaactcctaggctcatgccctgtggggagtgctcaggatcccccagaaatgcccattcccctcacattacctccttccctggaactataacctccagaaaaggaaaataaggagctggtgtcccatttctgcaaaaagcagaaaataactgccctaacagaccagtgatggggctagacccgggtttctgccactcgggcacttgacactgatggctttccccaaaggcagggactgatggccgaatcctgtcaaggaattggctcaaactcggactggatgagtgaggagagccgaagacagtttcctctgtcctacgtggggggtaaaggagggacccctttgatccctcagctccacagagcccagggcaaccaggaggctcccagccagtcacctgtcacccgtcagtggagcccagtgggcccgggcctcgaaaatggcgcccagccccacacaccccagatgtgggaacattttagggctccctgggccgtgaccctcaccctagccccaaggcttctgccaggttcttcagtccagccagtcggacaaaaatgagggtgaagaagccccagctgagaagcctagcaatctcctcaggccccttcaggcgtcgacagatcggtttgggcgacacccctcgatctgcctggcgcgcggcctttcccgccgattctctgcgcatgcgccgccgcgccccctcactctttccctacagctgtagcaaacactgtaaccacttcgccctccccaactccctgctctctccccacacgcacgcacgtgtgcacatcctctgactgctcacgcgccactcccttccccaccgcaccccaccccgacacccacgatgccacgcttcaggcggggctctaagacaaggcctttctctggcacatgcactttgcttccacttcatgtaaggaagaagagggtaggaagtgggagaatcgtctcattcattccttctagccttcaaacctttcgcatttacttaaagatcgcctactagaaaccaaaccttaaatatgcgtccaacaaggcagacagggacgttgccttaagagagctcagaagcctactagggctgcagacaagaattaaaaactcaaagatttacttaggtcatccgttctcatactttccggtctcttaagaattattaaggactccaataatttatgagttacatttatatgggttgtatgtttatgtgagttgtatctatcaatattaaaataaatttctaaaatagtcattgtttaaaaattcattatgtgtcaaaataacatttttatttaaaataactataatttctactccaaaagaaattttggcgctgggcgcggtggctgacgcctgtaatcccagcactttgggaggccaaggcgggtggatcacgaggtcaggagttcgagactagcttggccaacatgatgaaaccccgtctctactaaaagtcaaaaaaaaaaaaaattagccgggcgtggtggcacacacctgtaatcccagctactcgggagcctgaggcaggagaatcgttggaacccaggaggcagaggttgcaatgagccgagattttgccactgcactccagcctagacaacagagcaagactccgtctcaaaaaaaaaaaggaaaaaaaagaaaaaatttggggagaagaatggcatcattttacatttttgcaaatctctctaatgtctggcttcatagaagacagctggattctcatatctgcttctgcactgagtgtgtcaaaatagctcatgtcttgtagcttctggcaaacatcactatattcaaagaggaaatgaaagtgaaaggcaaataatatcttagtagtattatgaaaataatgttcacctcatggacccccaaaagtgtttcaagagcccccaggagtccctgagccacactttgagaatgaaaggcttaaattgttatgattgaacaaagagatgaagaggaaattttgggggtgctgtaagaattcatcacaatctttgggaatcattcaatctttcaacacgtatttatcgagagtctactaaatgctaggaactgggaatagtgtagagaacaaaacagaccccattcctgccctcgttttgcttcacacaacaagaaaacagatatatgatgaatctca[138 bp omitted]atggtgaaaccccatctctactaaaaatacaaaaacgagccaggtgtggtggtgcacgcctgtaatcccagctactcgggtggctgaggcacaagaatcacttaaaaccatgaggcagaagttgcagtaagccaagatcacactactacactccagcctgggtgatggggtaagaccctgtctcaaggaaaaaaaaaaaagtgctgcgacagaaaagggccacagacctatttatttctatcgaattttttttttttttgagacaatctcactttgtcacccaggctgaagtgcagtggcataatctcggctcactgcaacctctgcctcccgggttcaagcaattctccctgcctcagccttccgagtagctggggttgcaggtgcctgccattacgcctggttaattttcatatttttagtagagtcagggtttagtagagtcagcctgccatg[136 bp omitted]aacactggagttgaggcttaaaggattatttgctaggtgaaaaatgtgtgtgaacatctcaagccttgaggctgtgcaaaggccctgaggcagggcaaactgtgtgttcaaggcaccaggaaaagtctcagtcggtcaataaatatttattgaatgatgtgccccacactgtcctagacccctgggatatagttatgaaaaagattttacgttccagttgcacaaagaaagtaaatgcctaaatagaaagaatttcagagagtaagagtgctgatagggagttactttagacagggtagtcaagaaggactcttggggaaagtgatatttcagcagagagctgaaggaagggagccttgtgaacagcatagggaagaacattccaggcaaagaaaatggcaacagcaaaagccttgaggcaagaagtacacttgatgggttctggaaatggcaaagagtctgatatgaatggatcccagtgattgaggaaagggtagcaacagatcagatcagagcagtggcaggggccagagtattatttggaggcccttataggtcatggtcggaatttttttcttttttttctgggtgagatgaaagctatttgagggttctgagtcaaggagtgactttcattttaatggcaggctccccctggcttctgggcagagaatagcatgtatgggtgtattcctctgttttcacactgctgtaaagaactgctcaagactgggtaatttacgaagaaaagaggtttaattgactcacagttcagcttggctggggaggcctcaggaaacttacaatcatggcagaaggcaaaggggaaaaaaggcaccttcttcacaagcaaaggagggaagagccccttataaaaccatcagatctcatgagaactcactcactatcacaaaaacagcctggggaaaccacccccatgattcagttacctccacctggtctctcctttgacacatggggattatgaagattataattcaagatgagattttgggtggggacacagccaaatcatagcaatgggctaaagatagaagcagagagcccagtgaggaggaaatctctagtccaggcaagtgatggtgttgattagatctgggtaatagcaatggagatggtgaaaagtggtcaaattctggatctatttcaagaatagagccgacatgatgtgttgatggattgtgtggtggttttaaaatacgtctgcaaattcttcaacactttgaaagataaagtctatttccccaatctttgagtgcaggctctccttagcaactggcttccaatgaacataagtaatggtggggaacttcaggactaggtcataaaaagcattgctgtttcttacttgcccattcccttcaactgatttctgtaaaggaagccagtcaccatacggtgaggacactcaagcaatctgtgaagagatccatataagagaagagctgaaatttcctgccagcaaccagcaccaggtgagtgaaccatggtgaagtggatcctccagccgtagttaaatctccagatgactacagccccagccaacatcttgactgcaacctcataaaacactgtgagcagaaatcatccaactaagctgctcccagattcctgacccacaaaaactacagtaggtaagaaatgtttattgtgttttttttttgagatagagtcctgctctgttgcccaggctgcagtgcagtggtgcgatctcagctcaccacaacctccgcctcccaggttcaagcaattctcctg[132 bp omitted]cagcctcccaaagtgctgggattacagtgagccaccgctcctggcctaagaaatgtttattgttttaaactgctaaatttggggtaatttgttacagagcattagaaaactaatggtgattaggtttggggtctgagagaaagagaggaatcaagaatgactcagccgggagcggtggcttgcacctgtagtcccagcactttgcaagggcgaggtgggaggattgcttgaggct[170 bp omitted]ctgcctcagcctcccgaatagctgggactacaggcgcccgccactacgcctggctaattttttgtatttttagtagagacgggg[147 bp omitted]ccaggtgtggtggcacgcatctgttgtcccagctactcaggaggctgagtgggaagatcacttgagcccaggagattgaggctgcaatgagtcatgatcgtgccagtgccctcccacttgtgtgacagagcaagacctcaaaaaaaaaaaaaagactccaaaactttgggcctgaagaattggaagatggagtgacaatttactgaaaaggaaagtactggagtgtgcaggaggtgggagggaatcaatagtttcgttttgggcgtgttaagtttgagatgtcaattatacagccaaaggcagaggttaagttgtccttcactgcaaggagacctgggaaatgaatcttcctgagtccgcagttcaggggaaagtttgaggctaggcatataaattggtaagtcaacagtattgtagattgcgatgaacactatggcactgcatgatatcatctcgtgagtgagtgtagctagaaagggctaggactccccaaattttagaagctagaaaaaggacgatccaatgaagattgaggagaaccagccagtgaagaaggaaggaggaaaagcaagagggaatttgccagtaaaggaggaggggatcaggtgaattcaatgggtagaattgctgttctcaaacgttagtgcacatcagtcaccaggaaggcttgttaaaacacagactgccaggccaggtgcagtggcttgcctgtaatcccaggactttgggaggccaaggtgggcagatcacctgaggtcaggagttcaagaccagcctggccaacatggtgaaaccctgtctctactaaaaatacaaaaattagctgggcatgatggtgggtgtctgtaatcccagctactcaggaggctgaggcgggagaatcgcttgaacccgggaagcagaggttgcagtgagccgaggttgtgccattgcactccagcctgggcaatagagtgagacaaaaaaaaaacacaaaaaaaaaaacagattgccaggcccgcccccagagtttctgattgagcaggtatattcgcttcccgagactgctgtataaattactacaaacttggtggcttaaagcaacaaaaatatattatctcacagttctggatgccaaaagtccgaaattaaggtgtcagcacgccacttccttcaaaggctcagaggacaatccttccttgactcttcagtttctggtagctcctggtgttccacttttttttcccctgtagggtcttgctctgtcatccaggctggagtgcagtggtgcaatcacggctcactgcaacttcgatctcccaggctcaagcagtcctcccacctcagcctcctgagtagctgggactgtaggtacataccacaaagcccagctaatttttttgttaatttttgtagacagggtctcactatgttgcccaggctggtctcgaactcctgggctcatgtgatcctcctgcctcagcctcccaaagtgctggaattacaggcatgagccacctcacctggcccataataatgttttgatatatatagtgtatgcagtaacaggtattctatttgtagttgttaggatgtttaaggttagctgatttaacaaacaaccgtaaaatcttagtagcttaatacaacaggttgttacttacataaagtccaaaatgctttatgtaagtccaaggataattctcagcttcctgcagccagtgagtgaagggagaaagagtaaggattatggaggacatttcaggctgagtctagaaatgggctgtgtcccttctgcacccattccattggcccaagaccagtcacatggcctcaacttcactgcaaggagacctgggaaatgaagtcctcctgtgtgcctaggaaagaagaaaccaagttggtgagcatcaaagctgcagtgagccgtgattgcaccactgcactctgccacctacccttcgacttctggttaatcatgtactcatctctgaggagggatcagtgggtgggaaggagggattggtgtattagtctcctatggctgaaatagcaaattaccacagacttactacttagaacaacagaaatgtattctcacatggttctgtaggccagaagtccaaaatcaaggtgtcaccagggccacactccctccagaggctctgagagaaaatcagttctttgcatcttccatctcctggtggctccaggagttccttggcttgtggctgtagaactccaatttctgtgtctaccatcacatggtgctctcctcttctgtgtcttctcctctgtgtgtttcttagaaggacacttgtcagccgggtgcggtggctcacgcctgtaatcccagaactttgggaagctgaagtgggtggatcacgaggtcaggaattcaagaccagcctggccaagatggtgaaaccccatctctactaaaaatactaaaatcagctgggtgtgctggcaggcgcctgcctgtaatcacatttactcgggaggctgaggcagagaattgcttgaacctgggaggcggaggttgcagtgagccgagatcacaccacagcactccagcctgggtgacagagcgaggctctgtctcaaaaacaaaaacaaaaaacagacacttgtcatcagatttaggggtcacacagataatgcagtatcttgagatcctgaatgtaattatacccgcaaaacccttttttccaaataaggtcaccacaagttctggggattaggacatagacatatctttttggagaacgccatgcaacccactataatcagctataattatttttgtagaaaatgatgggaacctgacttaggatggtggccttggaaagaagtggctgggtttgcaatgtactttaatggtagagcagagaggcgttggtggtggttagaaacagaagctgaggggctgggcgcagtggcttacacctgtaatgtcagcactttgggaggccaaggcagttggatcacttgaggtcaggagttcaacaccagcctggccaacatggtgaaaccctgtctgtactaaaaatacaaaaattagtcaggtatggtggtgcatgcctgtaatcccagctactctggaggctgagacaggagaattgcttgaacgcaggaggcagaggttgcagtgagccataatcgtgccactgcactccagcctggtcaacagagtgagactccatctcaaaacaaacaaacaacaacaacaacaaaaacctgggtgtggtggctcatgcctgtaatcccagcacttggggaggccgaggtgagcggatcacttgaggtcaggagttcgaggtcagcctggccaacatggtgaaaccccgtctctaccaaaaatacaaaaattagccgggcgtagtgggtcatgcctgtaatcccagctacttgggagaatgaggcaggagaatcgcttgaacccaggaggcggaggttgcagtcagctgattgcaccactgtactccagcctgggcgaagagtgagactctgtctcaacaaccaccaaaaaaataaaagctgagggatgaggcaggtggtgactcagcgtttggatacagaactgtgtggctcaggactgggtttcaaaaagacccctctggggctatgtgggggacagactggagggagaaactagaagccagggagaagcctaaagtcagggtccaggtaggagagcaggagcccagagcctgcctgagccctcaggacagagaagaggggtggagtggagactcagcaggcaggagggatctggctaagagactgatgcgctgttggggaagaggggacaagatggagctttgacctcatgactagatagatggtggggctgcctcagatgaggaaaccaggtgagagaatttggggacatcagaggaaactgcagaggccactgggtgtgcacctgcaaccaggcactgcagacccagatctgactgtcaggatcccaggctcagtgcctcctcctctggggcctccgctcctcgggccccactgcagaggcaggaagtaccgcctgatgctcagcttccgctgggggtgttggcacggcccagcgccctccccactcccagggaccttcccacctcgagcctgtagcactttcacttccccaggtacccagcccctgcccccagcacctgggtgctccctggtccagaacaggctgcagactctgagaggcacaaaaacaagtggggaagggggagacagagaaaagaagacaggctgggcacagtggctcacgcccataatcccagcactttaggaggccaaggcaggaggatcacttgagcccagaaatttgagaccagcctaggcaacacagtgagactcccatctctacaaaaaatgaagaaaattagccaggcatggtggtgtgcacctgtagtcccagctacttgggaggctgaggtgcaaggattgctcgagcctgggaaggttggggctgcagtgagctatgatcgcactactgcattccagcctgggcgaccctgtctcaaaaacaaaaacaaaagagagatgaagagagaaaggaggaaggacccaaagaaggggccagaagcagagagaggccaggcacagtggctcacgcctgtaatcccaacactttgggaggccaaggcaggagggtcgcttgagtccaggagttccagaccagcctgggcaacctagtgagaccctatctctgtttttttttaattaaatataaaaaatacaacactcccactccatagcaagaccccatttctacaaaaaatacaaaaattagccaggcatggtagtgtgcacctgtaatcccagctactcagaaggcagaggtgggaggatagcttgagcccaggctacagtgagctgttttccccaccgtactccagcctgggtgaaaagtgagaccctgtctcaaaaagaaacaaatatataaataaaataaagaaacacagagagagggaggatagagaccccaggaggcaggaggacagagacccagaggagggagagactctgctgagataaggggacagagatggggagtagcaggaaggtggggacaaagacccagagaggaggaacaagagacccagggcaggaaatgggagacacagctggatgcagagatgggagagcttagcaggccatgaggtcagagtgtctgtgaggtcagctgctgtccagggtcagccctgaggtccccatgcccagaggtgggttccagtagatcaggggtccctttagatcccccagcgcctgagacatggagacctgggagggactgccccatgagtccttggtgcccacaaattccaaggcccctcaggtaccagagcatgtgtcccagtggagcaggtgagggagacagggacagagagagagacagaaagccaccttacatgaagcgggagtgggtggagccccacccctggaacttcctcttttggggttcttcctttctctctcagctctccgtctctctttctctctcagcctctttctttctccctgtctcccccactgtcagcacctcttctgtgtggtgagtggaccgcttaccccactaggtgaagatgtcagcccaggagagctgcctcagcctcatcaagtacttcctcttcgttttcaacctcttcttcttcgtgagttgcctcatggctacccagccggggcccagcccctgccgctaacccagccctcatcttcccctgtggcccacccccgtatccgcatctcctctccccaggtcctcggcagcctgatcttctgcttcggcatctggatcctcattgacaagaccagcttcgtgtcctttgtgggtgaggggggctggggcaggtgggagggcctcccccaacccaagcaacttcctggggtctcccttgtctcagggagacctacggtgccctactctgcaggcaggctacaggctcccatccactgctcaccggaggcttcttggagcctgagtcttcttccggcaaatggggttgtgcatacaaacaacaatgatcatgagagccatttctcaagcacttcctatctgtcgggacttgtggctggtcagatgcccccacaaaccttcccctcgcttgaggttcagagaggggaagccccttgatggatgtcatacagcaaggacgtaaaagagccaaaataacattaataataggaaaataataatgaagtatgaccctaaataataatgaaatataaccctaaacgctcatatttaagaagtctttgccctgtgttgaggactgggttgaacacatgtcctcatgtgtctctcaaaatgaccctaggggccgggcgcggtggctcacacctgtaattccagcactttgggaagccgaggcaggtggatcacttgaggtcaggagttcgagaatagcctggccaacatggtgaaaccctgtctctactcaaaaatacaaaacgttagccaggcatggtggcacatgcctgtagtcgcagctactagggaggctgaggcaggagaatcacttgaacctgggaggcagaggttgcagtgagccgagatcacatcactgcactccagcctgggggacagagcgaggctccaactcaaaaaaaaaccctaagaaatagatatcatctcctatgcctcagggaggtttaaggagccaagccaatgtcacagaacaagtgatagggctgaaactactggggacgaggaggagctgaaggaggaaggagagggtaagaggaagagagacagagatccagggacgggaaacaggcccagaaagaagagaaagtttcagaaggaaacagggactcagggtggggcagggacagagtcccagagagaggggcaccaagatactgctccccacttgggtggctgcctaggtgggaaatggggctgcctggagctgtgccacacagctcatcatcactcccctcacctctcccaggcttggccttcgtgcctctgcagatctggtccaaagtcctggccatctcaggaatcttcaccatgggcatcgccctcctgggttgtgtgggggccctcaaggagctccgctgcctcctgggcctggtgagtgcaccatccctctccgtccctaggaacactcctatccccaccctcaaaaatggcctgggccggggttgcaggggtggtcagcctgatctctccactctgctccccagtattttgggatgctgctgctcctgtttgccacacagatcaccctgggaatcctcatctccactcagcgggcccaggtgagcttcctgcagtggccaccacccacccccagcagggaggagagggaagggagtggtgggagagggtggagagagaccgaaacaagggcagacaggggctaacctagataaagagaaataagaggctgggcctggtggctcacgcctgtaatcccataatcccagcactttgggaggctgaggtgggagtccaggagtttgagaccagcctgggcaacatagtgagaccccatctatatttaaaaaaaaaatccgggtgtgatggtgtgcacctggggtcccagctacttgggaggtcgaggtgggaggatcacttgagccagggagtttgaggctacagtgagccatgcactcagcctgggtgacagagtgagaccctgtctcaaaaaataaattaatagaaagacacaccgacctggaccaagggagacaggcataaacagctccaaagggaaacacacgggaaaaagagagaacaagagaaagaaatagacgccctgaaagaagagacagagacttatgagccgtagaaatagtggaagaaacagaaagacagacctgaagtacacagagctagccattcagtaaggatttgagactggcccagagatgcacagggcccgcctgaggctggcacagcctgagagggggaggggtggggcggggaagataaggcccagcctcactggtggcctctcagctggagcgaagcttgcgggacgtcgtagagaaaaccatccaaaagtacggcaccaaccccgaggagaccgcggccgaggagagctgggactatgtgcagttccaggtaagcccccctcctccagttccctcccggactgacccgcctcagccctgtgcttggaggagactccaccccaacgtgggcccgacccccagctctacgatcctaacacaccccaatccctcccaggcccgacgctccccactccccagatgacacaactgtccccggcgtcgcctggtctcccagtacccagaccctggcgtggcttcgccatctacctcgagagactccgcccccgcccccgccccgaccagaggttgtcaggcccctagtcccaagaccctagcgagacacggcttcctaccccgtagtgactctggcttccaccggaccccgcccccgatgagactcacatggtctcgcactcctattcacctgtcgggtatcagaggctcaattgcaccacccacccaatctctagtccacagcgcgaccctgcagctccttccccagccccaggtcaccccgtgactcgtctttcccagccccatgttcccgtaatgtcccctggctccggccccatcgtgaccccagcccactgtcccccactccacacccaccacttagtcccctgctccccgacctgacctcatacccatcaccttgtcccctgatccccaacatcatatgtctccagtcccggtccctctgactcgtatccctctcccagctgcgctgctgcggctggcactacccgcaggactggttccaagtcctcatcctgagaggtaacgggtcggaggcgcaccgcgtgccctgctcctgctacaacttgtcggcgaccaacgactccacaatcctagataaggtgatcttgccccagctcagcaggcttggacacctggcgcggtccagacacagtgcagacatctgcgctgtccctgcagagagccacatctaccgcgaggtgggcaggggttcggagcataaacctgtcgaatggggcggggcctgcgggagggggagggctgtcagtgagtagcggcctgagaaagggcggggtctacgagaaaaggaaaggtacggcaggaggggcggggccctctgaagggggcggggtctgcaggaagggcagggcctaaagaaaaggctgggctggctctggaatacagatgtctagggaggggccaggcttggaaaaggtgaagcgagggtgcactagtaaggagactagagtgccctggtgactaggggagcgggtagatgcctgaagacggtgagggttggcctgaaaagaacgctgggcctgggcttgagagtcccagaaagaatccctttaacttttccctacaccccccagggctgcgcgcagggcctccagaagtggctgcacaacaaccttatttccatagtgggcatttgcctgggcgtcggcctactcgaggtgatctggccccgcccccacccgcgatcggccctaaatccctagatggccctgcccttcatttcgcgtccttcggttgcctgggaaggacgagctcagggcggagcgcagcccaccccggccctcccgccgctccacccagcaccggagggtgggggcggcccagcttcagggagccctgattgggtgtacgcagggaaagcctcctgctattggctgcgatctccctcccctttctccgcagatgactgtcatggtgctgagcgtacagctacagcgcagggcactccgccggaaatgcgagccgcacgtgccgggcgctggggattcgagccccgggcccagcctgatcgctgacggcggcggcgggcacagcggcagtctgtggggtggctggggcatggcgggtgcctgccccaactggggagacaaggcaccgcagggcaagctgcccatggccctggggctctggccgctgtgggttcaagacgaggaccagcctgacactggaagtgcgggcgcagaattagaggaggcacaattagaggctgaggcagagggggaagacagatgagcctccaaaataaaggaccctgggcttgcttccgaccttactccttctcagcctctacccccacttgtagcagctattcccgcctcatcagccagccctgcggcagttcccgtcgagccccgcccttttctacctatccccttctccagccccttcccgcccaattcacggccccacccctgacctttctcgcccgggtgggcatcacccccgtctcgccagcaccccttcgacttctctgacctcatctcctttctctatagctcgggttcatgacgctctcgatattcctgtgcagaaacctggaccacgtctacaaccggctcgctcgataccgttaggccccgccctccccaaagtcccgccccgcccccgtcacgtgcgctgggcacttccctgctgcctgtaaatatttgtttaatccccagttcgcctggagccctccgccttcacattcccctggggacccacgtggctgcgtgcccctgctgctgtcacctctcccacgggacctggggctttcgtccacagcttcctgtccccatctgtcggcctaccaccacccacaagattatttttcacccaaacctcaaataaatcccctgcgtttttggtaaaatagctttatcctctgtcagaacacaaacaaacaaactttgagaggggaggaaggaaaccgtctagctcagggctcacttaggagagggatgagattagaaagttcaacacactgcttgtgcagcggagataaagtcaagaccctagcacccacttataaatatctcgttatattaaaaaaaaaaaaaatgtccagggcccacctggctctgctcctgcacagaaagggttcatcttcactttgtgatctcacaggtcatggagtgagggtggtagagaggggcagaaatttcagggggaggggtggctgggaaaaagtaaaggggacaagccaatgtgtaactagcgctctccaagacatgcagaggagtgggggtggcctgtcaggggctgaaaagaaaagccagtgctgtacctggggggttgtctcactcctgtccccacaatccctgatactccggagtgatctgtcctttcagacacccactgtgaggtcccaatatcggggtttatcctttcctcagtcccagcctgttcagctctccaaccaagttttgggggcccctctaatgggggggatggccccagttgcttaggcctctgaggtcaacccctttacatcacagccctctccccaaataagaagcatgaggtgagctggaggaccctccctgggaggagggtgttctggggggtgagccagttttggggtcccccttcagtccctgaccaggcggtaaatgtgatgctgggccccacgctcgctggtggagacctcgaagacataggcggtgcagagcagcagttcctgggtgtctctgtttgtcaccacctgccaggaaggccaggacaagggacttatgcttagaagggagggcagggacccctgtgcccccctgccaagctatcatggaatacccagcaggctcttttccatctccaggaaacaggccgccaccatatcatgttccccaggagaaagggatgcccaaaagtcagttccctgggcaatgggggttacccctcagctgagcgttggcagttatggtgtatcacatctcagggttaatcgggttcccatcacatcacattccctgggtaaaaggggtccccatcatgtcacaagtaaagggagaaccctccctgcaggttccgcggtcaaggggtctctgcctcagcagtccaaaaagttaaaggggctcccaccatatcatgttccttgacaagctgaggatctgccttcgagtgccctccagtcagcttcaccagggaaggagggacccaccttatgtgcgagtgctgtggggctgggcgtggtggctcacacctgtaatcccagcactttgggaggcctaggcaggtggatcacttgaggtcggagatcaagaccaacctggccaacatggtgaaaccccatctctactaaaaatacaaaaattagccaggcgtggtggggcgtgcctgtaatcccagctactcgggaggctgaggca[137 bp omitted]gaagggtcccctaaactaagggtcaatggtggggtccccgctgcatcagtttcctagttaaaagagcctcaggctgagggctcactttggagtccctgctgtgtcagttcctgggtgaggagatcccctagactgagggtctgttataggtactgtccctccacactggggggccccactccagcccagccccaggcatcacctggaggatggtgaagttttccaggacgctgttcatcatgtatcgctcaggcagctgccgcaacttgtgcaagaaattcaccaggtactcgcacatgggcgagcgcagcaggcggtacacaaatctgccgtcctccagctgggcccgttccgtctgaaccaaggggaagggagttgggaaaatggtggctgagagacccacgggtcaccccaggaattgagctccaccctgtgcctctaagatgccaccacactcactctcactgccaccttcctttcatcaccccacccacagtgactggagactgggcctgaaccctcggagatccgaatcaggatctctgagcctgcaaatcacaagcccctcaaagtgattctctgaacccccaaagacctctggactcctctaacctcccagccctcagataccctccaaagacccctccatgacgtcttcaaactctgacttctaaacttgagacttccccaagtctccagcaactgtaagtgtgacttctgaaccttcttgccctaagaacctctccatatccataagacccttctcaatctcagtgactctaagtctctatactacacattacctgtcagcccgcagaatgatccctgcctgtgacttctgaactgcccattagctcccaacgcatgcattaaaccctcaaagaggctgggacccactccctccatgcatactcccaaatgcctgagtcatgatggcttctggtccattctgcacccccaagtgctgacccagagctccacccctccagcctcacctccaccttctccaccacctgcttgccaaaagagcagaccttggaggaacaggtgagggtcatgtgttccaggctctcatactggctgctcactccgtagaagccaccactgctgatgctgccaccggcccctgcctcctcaccacttgggccccagttcaggtccgcctgggagatgggaaggcacagatgagtcagaggggacatcccttataaacagtggggactaccaggcgcagtggttcacacctgtaatcccagtactttgggaggccgaggcgggcggatcacctgaggttgggagttcaagaccagcctgaccaacatggagaaaccccatctctactaaaaatacaaaattagccgggcgtggtggtgcatgcttgtaatcccagctactgggacactgacgcaggagaatcacttgaacccgggaggcagaggttgcggtgagccgagatcataccattgcactccagcctgagcaacgagagcgaaactccatcttaaaaaaaaaaaaaacacagtggggactctgccccatagcctaccattacccctgcagttcccggcttgattcttcagtgttgttttgtttttttgttgtttgtttgtctttttttttgggggggggggaacagggtcttgctccgtcacccaggcaatgtgtggtggtacaatcacagctcactgcagcctcgacctcctgagctcaagtgatcctcccatctcagcctcctgagtagctaggaccacaggtgcatgccaccacatccagctaatattttgtattttttgtagaaacagggtttcaccatgttgcccaggctggtctccaactcctgggctcaagcgatcctcccaccttggcctccgaaagtgctgggattacaggcatgagccaccgcgtcaggctttcaaagttctccaagggctggtttctggagaagatccaccgtccatcagcgttgaagaagtctgggtccccaaaacagtcttggccctgtctccccagtaaccaaaggagccctggaattcaatttcaaccttttttcttttcttttttttttttctgagatgaagtctcgctcttgttgcccagtgcaatgccgcgatcttgactcactgcaacctctgcctcccgggttcaagcgattctcctgcctcagcctcccaagtggctgggattacaggcgcacgccaccatgtctggctaatttttgtatttttagtagagacagggttttgtcatgttggccaggttggtctcaaactcctgaactcaggtgatccacccacctaggcctcccaaagtgctgagattacaggcatgagccactgtgtccagccaattcaacctttttcccttgaagcccgcaactcaagagttcagccccttccaagggcctggttactatggcagttacttcttagcaaccagttcaagatgaatacctccctctaagcccctctcactctggttgctaaggcaagtggctactccctagcaacgggacctcacggagcctgaggaggcctgactcctcctcagagcacttccccctcggccaaatctgagaggtcagactccctccatgaccccagtggccaagtgtgtgtagacagctggccaagtgtcactaggccaagtggggcctaaggaagcctaagagctcatcacacctttggtctgagtcacctccttgcgaggcgcacctcttcctcttcctaactttagttgctaacactgtgccaggtccgtcttctcaggggcccgactccatctctcaccgtggcaaaaccaaagaccttaccagctgctcctctgaaccccttcagcagctgggcttcctaagggggtggctctccagtcctgggacctgataaggcctgtcttaagccccaacaatgtctaagccctcagctgcacatccccagagcagtttcaggcttctgcttcacatggcagaaagctccagaaccgtgaacagcaagctccagaacaacaacactcccagcaagaacagtaaagttcaggccctcagcaggcctttccttcctttccttccttccttccttctttctttccttctttcttttctttcctttctttccttcttcctttcttcctttctttctttcggcagggtctcattctgtcacccaggctggagggcagtggcacaatcttggctcactgcagcctccacctcccaggcttaagtgatcctcctgcctcagcctccacagaagctaggaccacaggtgcgcaccaccacacccagctaatttttttcattttttgtagagttgaggtctcactgtgttgcccaggctggtgtcaaactcttgaacacaagcgaaactctcgcctcagcttcccaaagtgctgggaagataggagtgaaccaccacacctagccaggctttcttctcagagactagatccctccaccacctttgttactataagaactagcaccccctaaacatccaggcaacatttattgagcccaggccaggcactgtggctcacacttgtaatcccagcactttgggaggccaaggtgggtggatcacttgaggtcaggagttcgagaccagactggccaacatggtaaaaccctgtctctactaaaaatacaaaaattaggccaggtgcagtggctcatgcctgtaatcccagcacttggagaggccaaggtgagcggatcacatgaggtcaggagttcaagatcagcctggccaacatgacgaaactccgtctctactaaaaatacaaaaattagctgggcatggtcgtgcatgcctgtaatcccagctacttgggaggctgaggctggagaatcgcttgaacccaggaggcagaggttgcagtgagccgagatcgcaccattgcactccagcctgggcaacaagagcaaaattccatctcaaaaaaaaaaaaaaaaaaaacaataaaagaaaataaaacacatttattgaacccctgtagtgttagtcatcatactggacaccaaaccaagtagccctaagaaacacgcaagatgggccctcttagtcccaatcatataaatagcagctgacaccaggcgtctatataggaagtgctcaataaatgattgctacataaatacaggacttggacgggtgcggtggctcacacctgtaatcccagcactttgggaggccaaggtgggcagatcatttgaggccaggagttcaagaccagcctggccaacatggtgaaaccccgtctgtactaaatatacaaaaattagccagatgtggtggcgggtgcctgtagtccaatctactggggaggctgaggcaggagaatcgcttgaatccaggaggcggaggttgccgtgagccaagatacagccactgcactccagcctgggtgacagtgagactatgtctcaaaaataaataaataaacaaataaatgaatacaggacttggcaaagccactccatggctcttttcatcacttcctcaaagccagacattctctagcaacaaggtctggtgaaactgatgcaaagcatcagtcccctctttagaaaccagtctccacaagtccactggctacggggaggggtctttccttagcagcacggcttggtgcagtcaggtggggcacagggaagcctggaacatggcaagcccatgcccaggaccctattagctacatggccaggtaactcaccgtattagttacatgtggcaatgtctagtgggatccagggaggcccagacacctccaacccaccctgggggctggcctcctcggtgttccttgttgcaaagggggctgacactccaagccatgaggactgactggtaagtcccaggctgacctggtagggcccgcgacagattctctcagggccagaggcctttgctgggacaccacaggatttgtgagcacttttgattttgctgtgagaactcacccagaacttgaccaggaagaaggcatggggggggccacgatcatatagctctcggaggccaccctttttctcagggaatttgtcgtagatctgccggacgtccacactctcgagcggcggcgctccggggctggggcagtgctggctgatgtgcacgaacaggtgcctctggtactgaggagggttggccgtgggtgagaagtcggaggtgagctggatctccagcctgtgctgcctgagcccaccaaatgccgtcaccatccccacagctctggccagctgttccacacagtccacccagcactgggcctgactgccacccatcgtccccactcctgcttctgcacccagtcccctgcagccctgcagtcctacagtccccaactccctgccacaactcccccaactccatcctcactgcctcagcctcacctcaggcctcccaccctcaccccagcctccaacctcgcctctccagttcatccctcatgtggctccagacctgcccctgaccctcccctggtcatggccctcccatagctccccagcagccccagggcaaagctcacaccccctaggcctggtcctatatagaacaggtgctcataaatggtcaatggatggaagagtgaatgaatgggaatccacagaggtcttgtggttgatgttttgattgatgtttatatggtgtggcagagactgctacgtgttcacaaatcctggttcctttacacagtgtgaaactacatttcccaggccgctttgcagttaggtgtgaccacatgactaagttctggccaatgggatgtgaccaggcctgagagtcgacacatccaagtcagattcctaaaacctcctgcacaatcttgactctctcccttcctccatctgctggccagatgcagagactccatcagcagattctgaagccttagaaaatggcagagccacaaaatggaaggagcctggatccccaaatcacttgagtccaaggctcctgctgaacctacattgaaatgttacatgcaacttatctggcattcagtccctaagagttaggagctgtttcttctaacagtcggcccactccatcctagcccaggagaagctcaagcacagaaataaaatcttttccaagttcctagtatgcatcacaaagcctagtgaacagtagaaactcaaacacgtttgataaatgaatgaatgatgtcctggggagcttttctgaccttcccaacttgtcaccctatgaccttccagttcctttatgctagtagttctcaaagtacggtccccagaccagctgcatcaacgcacctggtagcttattagaaatgcaaattctcaagccccacatcacatctagcaaatcagaaagcaatctctgttttaagaagcccttcagatgattctgatacatgctaaagttttaaaaccatgactttatacattcccttcctgtcaccctctatatttcaaaatccctcagcgactgtaccaaaatttcactcacagaatcaactgcatctggcggttccacgaaggctgagaactctaccagctgcaaccgggcggtgcccaggccccgagcctgccaggctgggggcgatggggtaggtgggggcaggggtgagagggcttgggggggctcgtaccctagagagagagaagaaagaacaatacaaattgctaacatttatggaatatatcaggtactgttgtctcttgcctgcctccacttagaagctgaaaaagctaaatactcactttcccagcctcccttgcagttagaagtggccatgtgacacagtcctagccaatgagacgttaggggaaatctgctggggggcttctgggaaggagtttcttcctgaatgaaaaagacagaactttgggaggagaaagcttttggccctggccaagtcctgcttgggagattgatatggtttggatatttgtcccctccaaatctcatgttgaaatgtgatccccagctgggcacggtggctcacacctgtaatcccagcactttgggaggccaacgcaggtggatcacaaggtcaggagattgagaccgtcctggctaacatggtgaaaccctgtctctactaaaaatacaaaatattagctgggcatggtggcacgtgcctgtaatcccagctacttaggaggctgaggcaggagaatggcttgaacccagga[137 bp omitted]tgggggtggatccctcatgaatgtcttggtgccttccccatagtaacaagtgaattctcactctttgagttgatgtgagctggctgtttaaaggagcctggcttcgctctcttgctccctctcaccatgtgacatagtggctccccttccccttccaccatggtcctaagcttcctgaggccctcaccagaagcataggctggcaacatgcttcctgtacagcctgcagaactgtgaaccaaataaacctcttttctttataaatcacccagtttcaggcattcctttacagcaatgcaaatggaccaacacagacatgatccctggagttgcaacagccatcttgggacaataagacagacatgagaggaactacagagattccagtcctgatattgctaagcccacacgggaacagcccacctccaggctttttgttgcatggattcataacatgaatgcttttactatttaaggcacttttaatgtgggtcttctgttacttgcagccaaaagtattcctaattgataaatctatggaaactaagggactccctctttcactgatgtgagttctcagggccatatcagcatggacttccagaagccatctttgctgccaagtagctgagtctgcctgggaatgaagccaccacagtggaaagcagatcaaagtaatgactgatgccatcacttgagccgctggatccagccacgcctgaggccataattctgaactgtcagttactggaaccaataaatcaatacatttttcttattattttttattttatttatttatttattttgagacagagtcttgctctgtcgcccagtctggagtgcaacggtgccacctcggctcactgcaacctctgcctcccaggttcaagtgattctcctgcctcagcctcccgagtagctgggattacaggcaagtgctactgctaccacgcctggctaatttttgtattttttagtagaggttggggggggtggtttcgccatgttggccaggttggtctcgaactcctgacctcaggtgatccacccgcctaggcctcccaaagtgctgggattacagctgtgagccaccgcacctgcctcttcttttttaaaatgttgcttcagctggcttgatttggatttctatcacttgcagctgaaagaatcttgactaacatacctcccccatgtctcataagctagcaagtggcagaacacaaacccagtgtgtggctgcaaagaccaaaatctcctaaccatcaccagttccaccactcagctctccagcccctcccggctcccccgcccccaacacacacaccctgcctcaaagctgggcttcagtaagaatgtatcccctaattggccgggtgcggtggctcacacctgtaatcccagcactttggaaagccgaggcaggcggatcacaatatcaaaagatcgagaccatcctggtcaacatggtgaaacccgatctctactaaaaatacaaaaattagcccggcatggtggcgggcacctgtaatcccagccactcgggaggctgaggcaggagaatcacttgaacccaggaggcggaggttgcagtgagccgagatcacgccactgcactccagcctggcgacagagggagactccatctcaaaacaaaacaaaataaaacaaaaaaaacaatgtatccctcaattgatggaaggttgaaggaaaggcagtaggggtcgaagagagagaggggagacaagggagggtggagcgcaggctcttacctgggaggtcagtagatgggggagtcagtgacaaggtgaacggtgtctgtgagaatggcttcacactgagggaaaaaggaagccaggggttagccaggtagaaagatgctaatgtcaccagcaaatgtttactgagaggccacaacaagcaagaccctgtgcattttgtgcacaatctcactgaagcctcacagtgcgtgaggtaggtagaatgactgctcttttcattgcacaaatgaggacaactgaggtatagaggggtcaactgacctgcccaaagtcacacagttgagatgcagcagagctgggacttgaacccaggtcagtctcagcccggtatctcaggctcttgatgatgacattttggtatctctcacaaaatgtcagaaagagaagagaaaccagcctggcgtggtggctcacacctgtaatcccagcacttcaggaggttgaggcgggcagatcacttgaggtcaggagttcgagaccagcctggccaacatggtgaaatcccatctctactaaaaatacaaaaattagcagagtgtggtggtgcgcgcctgtaatccgagctattcagggggctgggccaggagaactgcttgaacccgggaggcagatgttgcagtgagccgagattacgccattatactcctgggtgacagagcaagactccatttcaaaaaaaaaataaaaagaaagaggagagaagagaaaccaagtcttggaaggcagggagaagacgcagaagacaaggaatttggaggaagaagaggctgaggggttgggagggtgggaagaaaatgaccaacactcaggagatgggacaggaggccaaagtcggggtggggaggcagcactggccaatagaactttccagggatggaaatgttctattggatggaaatctgtgccatccaatacggtacccagtgcccacatgtggctactgaccacagaccacgtggccactgagcacaagtgtggctcatggacctgagaaacagaatctttaattttatttaattttaatttaaatagctgcatgaggctagtggctacagtatcagtcacagccctagtagcccaagagatagtggtgaagagacttagatgtcagaggtcagaccaggcgcagtcgctcacgcctgtattcccaccactttgggaggccaaggcaggaagatcgcttgagcccaggagtttgagaccagcctgggcaacacagcaagaccccagctctatttttttttgagacagagttttgctcttgttgcccaggccggactgcaatggcgtgatcttggctcaccgcaacctccgcctcctgcattcaagcgattctcctgcctcagccttccaagtagctaggattattacaggctgtgccaccacacccagctaattttgtatttttttagtagagacggggtttcactgtgttggtcaggctggtctcgaactcctgacctcaaatgatccacccacctcggtctcccaaagtgctgggattacaggcatgagccactatgcctggcctccttttcttattaattctttgtttatatgtttattgtctgtctcctcccccgcccaccaaatatatgaagctccgtgaaggcaggaatttcacctgtcttactgctgtgcccccaaaccaagcacagtatcaggcacttagtaggcactcaacaaatactggactggcctcctctagattcctggaacccagaaagatctcctacctgaggactttgtcgtgtgctattgtgtctgcctaatatattcccactcccattctttttttttttcctttgagatagagtctcgctctgttgcccaggctggagtgcagtggcacaatctcagctccctgcaacctctgcttcccaggttcaagcgattctcctgcctcaggctccggagtagctgggattacaggcgcacatcaccatgcctggctattttttgcattttaggtagagatggggttttactatgctggacaggctggtctcgaactcctgacctcaagtgatctgccctccttggcctcccaaagtgctgggattacagatgcgggccaccatgccgggcctcccactcccattcttcacctggctaagtcctacccggccttcaatgttatcttctcagagaaacccctagaactttctcctccaccccagaacctgctgtggttcttcacagcacctcacacattcttcgattttctgtttatgcaggtgatgatttgatgaacgctcatttcccccatttgactaacagctccatgaaagcggaaaccccagcgtcagggcagtgcctgcccagccccctaccttccagctaagcaacccccctgcaaaaccctcagcccccaggtacttgatctgatgcttcccgtatccccattcagcagcagctccccagtgaccttccttctcttccagtctagatcccacacagcctgtcactgcactcttttttttttttttgagctggagtctcgctctattgcccaggctggagtacagtggcacaatcttggctcaatgcaacctctgcctcctgggttcaagtgattctcctgcctcaccctcctgagtagctgggactacaggtgcctgccaccacgcccagctaattgttttttgtttt[176 bp omitted]gcctcaccgtcctgcagccacactacccaaccaatgcctagcc[137 bp omitted]acatagcaagacccccgtctctacaaaaatcaaaaaattagccaggtgtggtggcacatgcctgtagtctcagctactcaggaggctgaggcaagaagattgcttgaacccaggaggctgaggctgcagtgagccatgattgtgccaccgcaccccagcttaggcaacagaagaatatcctgtataaaaaaagaaaaaaaaaaaaaagcacttcccatcatcttctggggcccatttctattcttgtaggctacaaacatatcccgtcacctcaaggctctctcagaactgaaaaggacactcccacttacctctgggaaacattttcttccttctgaacctaagagaagattaattataacctctgttctaccctcaggtccaagaaccacctaatagaggctgggcacggtggctcacgcctgtaatcctagcatttggggaggctgaggcgggtggatcacgaggtcaggagttcaagaccagcctggccaacgtggtgaaaacccatctctactaaaaatacaaaaattagccgtgcatagaggcaggcgcctatagtcccagctactcgggaggctgaggcaggagaactgcttgaactcaggaagcggaggttgcagtgagccgagatcgcaccactgtactccatccagcctgggcaacggagcaagactccatgtcaataaatacatacatacatgcatacatacatacatacatacatacataaatggggggacacaggagctagaaggtggagtgagaaaggtctctgtgggagtgtgagggtggggggcaggtgctgagccaggacacatagtactcactctggaacattccaggggggcccagatcctccagaccaaaactggaaaagctcagaggcctggataggacacaaagaaaaatggttggtcagtcccctgtggacagctgcagccccatccatccccctttgcccccacgtcccacaatccccaacctggaccacctgaggaccagtgggacccagtttggcctgcagagaaggcgcggagatgagctgggcagaggacatggttgccattgtctggaaagccttgtccttggaaacctggtcctggaggaggaggcggaagttcatgtgagaggggcatctcagtcaacatggcaagagggggatggtgccagggtggggtgaagacggggaggtgcagaggtggggagtcaaggcaaagggttagtggccgggcatggtggctcacgcctgtaatcccagcactctgggagccggaggcgggcagatcacttgaggtcaggagttcagtatcagcctggccaatatggtgaaaccctgtctctactaaaaatacaaaaactagccaggtgtggtggtgcacacgcataatcccagctactagggaagctagggcacaacaatcactggaacccaggaggcagaggttgcagtgagtggagatcgtgcccctgcatccagcttaggcgacagagcaagaccctgtctccaaaaagaaaaaaaaaggcaaaggcttgggttgggggagggttgaacctctccccacagccctctgcccctcctcagggacagggcactagtttggagtgagcgtgggtgggaggatgggcagaggaacttaccacgttcagagcctgcccgtgggggtgggggagggtgccaaaggaggaaagaaaacatgacttaggaagtacggcccggactcccccacctccctgccctacccgcccgcacagccccgccaccctgagctgagcagtgccaagggatggatgcgcaacaggaagtggaggtggccagccctggaggggaaaaggggctccctgcccagaaagacagtgatgggggtttctagaacaaggaaacccagaaggttcccagatgtccaggagacaggaaatgagaatttcagagccagcgggaagacaaggtaaatgtttcctaatccagacagaacagacagggaacacagaaggtcgagaacagaccggaagggaagggtttcagacctagagagaaagaaagggaaagctgctggatacaaaaaaaaaaaaaaaaaaaaaaccagaagcgaccgtccccaagtccagaaaaagagacagaaaaacccccacacacccagaagggggagaaaatgagggtctccggccaacaggaaccaggaaatccaaaggatgaggagaaggaaatgaatgaggaatctccaccaggaaatgaagatttctgggcacaaagagtaggcaggtcatgcaaaggtcaggaaatgggaaaacaaaccagcggagatgaagaggaggccttcacagcacaagagggggaagatatgagaccgccaggaagagggaaaggagggacaggagcagagggaagggagggggacaggaacagtggtcaagggaggggaccgacggcccatccttcctgctgtcctgagcaaaaccttcagcctcctccatgccatcgctccctgcccagggtctcagcaaccgcaccaccatccctatgcatctccctttgtgggccactgactccccaccctggatgactgcaccccccgccctgaccacagaggtccctcacctgaggtctctgtccccctctgtctctgggtctctgtctccctctgtctctgggtctctgtccccctctgtctatgggtctctgtccctctctctctgggtctctgtcctcctctctttctgggtctctgtccctctctctctgggtcttggtcccctcccccaagtctctgtccccctctccctgggtctctgtccctttctctctgggtctcagtcctccccgctctaagtctctgtccccctctccctgggtctctgtccctctctttctgggtctcggtcccccacccccagtctctgtccccctctcaggatgtctgcattggtccctaccttcaacttggactggatttcccttgatttccttcgggccaaaacctggatgtgactagaaacctggaaggatcaacggagaagcagattcaggccacagccaccgcccctgtgttcactaccccttctctccctccaggtgcctcactgagctgctggaccatgaaaggtgaaaaacacactgaagatgagagccatctcgggagcacccgaacacagatgtccataaaggagctcgtgaacaccacggaccctcccgggacccatcccatccaggcctccttcccctccaccatgctctctctgtggctactctgggtctaacacaaccactagaaaaactatccccaaacaggcacagtgagagcacacgaacagacatgctgatacagttcggacattcgtcccttccaaatttcatattgaaatgccatctccagtgttggaggtgaggcctggtgggaggtattggatcatggaggtgaacccctcatgaatggctttgcaccatctccttgatgatgagtgacttctcactcagttcacacaagatctggttgtttaggccaggtgtggtggctcacgcctgtaatcccaacactttgggaggcctagatgggcagatcactggaggtcaggagttcaagaccagcctggccaacatggtgaaa[142 bp omitted]tctactaaacatacaaaaaattagccaggtgtggtggtgcgcgcctgtagtcccagctactcaggaggctgaagcaagagaatcgcttgaacccgggaggcggggcttccagtgagccaagatcacgccactgcactccagcctgggcaacagagcgagactccgtctcaaaaaaatatttaaaaaatgaaaaaataaaaatttgccagatgtggaggcgcatgcttgtaatcccagatacttggaaggctgaggcagcagaatcgcttgaacccggaaggcggaggctgcagtgagctgagatcacggcactgcactccagcttgggagacacagtgacttttctctcaaaaacaacaacaacaaaaagatctgggtgtttaaaaagagtctgggacctctgtctttcttctgttgctcccactttccatgtgccaggcctgctcccactaccccctccgccatgattggaggcttcctgaggcctcaccaggagcagatgccagctccatgcttcctggacagcctgcagaactgtgagccaaaataaagctcttttctttctttctttctttttttttttttttgaggtggagtctggctctgtcaccaggctggagtgcagtagcacgatcttggctcactgcaacctccgcctcccgggttcaagcgattttcgtgcctc[134 bp omitted]agtgctgggataacaggcatgagccactggcccagcctaaagctctttatcaattatccagccttgccaggcacagtagctcacgcctgtaatcccagcaatcccagcactttggggggctgaggtgagtggatcacctgaggtcaggagttcgagaccagcctggacaacatggtgaaaccccatctctactaaaaatacaaaattacccaggcatggtagtgcatgtctgtaatccctgctactcgggaggctgagacaggagaattgcttgaacccgggaggcagaggttgcagtgagccaagatcgcgccactgcactccggcctgggcaacagagctagactccatttcaaaaaataaacaaatacataaataacccagcctcgggtaattctttatagcaatacaaacggactaacacacatgccgagaagacagatgaacgcacaggaagcagcttcttccttgaacctgaacctgcccatgcgaggatgaccctaagaagaccggcccatcccagacagaagcccacaagtccattccgagacctgttttcgagttcgggtcttccccgttctcagcttgatgtagcgggcgatcagttcattccgacctgaagattcaaagacggaacagagttagttagactttcaacagaacttccccacagcatggacaccagggaagaagaaagcagcatgggtccccaaaggtctgcagcaagtgggctgccggtcccctcagctacgtggaagccagactgcttgggttcaaatcccagctccatcacgcactggctctgtgcgaccataagcaaatcacttaacctagctgtgcctcagtttcctcatctgtgcaaatggtgatgctagctcctacttcagagtgctccataaaccttggttactgtcattattcatcagtgggggccagggcaaaagacagaagtagactcaccatacatcttgccttcatcagacaaaattattttccggcggccgcagggtggatagatggccagggcctcctggaagctctgctcaatgtctgggctccacaccccctctgcatccgggcccccgtcacccccagccccctcactgccgccggtaccctcctcactgccttcctcactgcccgtccagccgctgccatcgtccagggcggccccagcccggggttcccccatctgggcctggaggaacacagaactcagcaagcttcccccaaaccccaccctcaagggacttgaagctgagagggctgggactctggaccactgggtctgagggaggaggggctggggacctggactcctgggtctgagggaagaggagctggggggtattcctgggtctgagggaggaggatctggggcctgaactcctgagtctgagggaggaggggctggggcccggactcctaggactgagggaggaggatctggggcctggactcctgggtctgagggagcgggggctggaggcctggactcctgggtgtgagggagaaggggctggggtctggactcctgagtctgagggaggagaaggagctggatttcttggaaagctgaggatgggagtgttctcagagtttccagaggaactcaattgtgatgaagtcacaatgattaccctagagtaatgccgagggccatgaaggctaaaggttcgggtatgaattacgggttttaaagaagacaggaggcaaaagttagtggtggggaaggaaggtgtgggtgaaacttcccctgtcccaccccaagaacaggtggtaagatgtgagcagcagctgccagaaaagaagaggggccaagcaagactgaggggaggtctagagagagggggacagagacccagagagggagggggacagagacccagagaggggatggggacagagaccagcaagggggggggacagagacccagagagagaaggggacagagaccagagagagagggggacagagaccagtgaggtggggatagagacccagagacagagggggacagagaccagagagagaaggggacagagacccagtgaagggggggacagagaccagtgacggaggggacagagacccagagagagagggggacagagaccagagggagggggggacagagaccagagggagggggggacagagaccagagagggggacagagacccagagagagggacagagacccaaaaagagagggagacagagacccagggagagggggagacagagaccagaaagagggggacagagaccgggggggggggacagggaccagagagaggggtccagaggcccagagagggagacagagacccagagagagagggtgacagagacccagagagagggggacagagacccagagagagagggacagagacccagagagagaggggaccagagacccagagagagggggacacagactcagagagagggggacagaggctcagagagagggcaacagagacccagagaaagggagacggagacctagaaagggcagggacagagactcagggcagcagctgaggccgagaccaggagagacccacagaaccacaagctgggggacaggggcgccctgccatcagaagagccagaacaaagggcccaggcgtcccctcccccagcttcccacaacccccatcaggggaggggcttgccggccagggcgactcccctccggcaccgggccccgcccctcccctcccccgtgcgccgtgggctctgatccaactcaagttcccagtgactttccggaggccgggaacagggaaaactttttccaatacagtcagatcccgcctccccggaggctccatgtcctccacagctttcccaggaccccagagtccaggcccctattcccctcctcccgccgaccatagcagacaaagaccccagccaagcccagtggcgctgcggcgttcaggacccccgtaggccaaaatcccagcccagcccttccccatgtggccagacaaagggacggtggagccgggtaagaaaggtccccctaatttcccgccccagaccctaaacctccaaagaggcaagacttaagatccagaaagccccgtaacctcccctcggccaccccagaggccctcccttctccgtaagaaggaccaaatgccccccagattacacaaggggtccttctcactccaaagtgacaccgccgcagacgcacgccccacaccccgccagcgcccttggcccgcacccgctcctgcgcgcacgcccaaactcagacccagccgcaggcaccctaactccggccagagttcccactcctcactgaggctcggtcacgggagcaaattcgggcccccgggcaaaaagagggctgcgaaccattcagagacggtcccgcaaacgcacgcctcacctcctaagaagcaactccccaccccaactcacacaccccaaagcaggatccccgactcccgccggcgccttcctacctcccggcctggggctggggagccgcgggcgggcggggcgctgcgagggagaaagttgccgggagctttgtttgggaaaagtgggagggaccggaggggggggcgggcccggccggcggacagcgggaagggggatccgacggtgacagtttggggaaggatttttgctttgggagagattagtctatctcggggctggtaggaactcaggatttgggtgcttgggaaaggagggggattgggggttcggactccaagtcggagggaaaaggctgataggagccagaaacccctgatctgagggaggagaggctgggggctgggactcctgggtctgggggctgggactcctgggtctgggagaggaagcggctggagagagatatgggctcctaggtctgagaggggacggggctaggcgcctggaatcccggctaccctcgtgtttgtgtattgggggtgcggaagtgatacgaatacaaagagtctttactgttaagccctgaggttttttttctttttttctgtttggtttttggtttttttgttttttgttttttttgtttttttttttttttgaggattggggtctggggatgggttttgactgattcctatgacgacctggtttccttgtgacctcaccacagttaagagtcgtgggcaggaccaccgggagtttattggaggcccacgtaggtgcagattcctcatctacaggcgctagtggactggagacggctggcggctgtcccgggacggggaagagagctttggtgcctgagggaagatggcttagggcccggtcccttaagggtgaaaggctgcgtgttcaaaattacgggactagagggggcgggagtccggacctgaggtcctcagggaaaaggaagtctgattctgggttccttggaagatgaaatataagactggatttagggtttccggagacaacgggactttttagtggagcgggagcgggaaaaccagaagggacacggagaaaaggttccgaaacagatacacaattagagtgagagctaaaagggatgcttgtactccggtgtctccagtaggaggagcctaggactggaacttggggtgatgagggcaagatctgggacgcaggggcgtggtccagtgcaggggcgtggcccagtgcaggggcgtggctttcagccaaggggcgtggccattgcgattgggcgggactccgaaacgagggccgcaatcagagaacaccgccaggacttccaggacttggtctccaggactgaggtcaactgacgtgggcgtggtctgactgtgtgggcgtggccagggaatgaactcacggctctggcttaaggggtgtggtgaacgaaggatggggcgtggctgtgtcaccaagggcgtggtcatggagtagaggcccgggctcctgggtgaggccggcaagtttggagcgtggtcagacaataggggcgtggctacggctcgcggagcgcaaccaacgctctagaccagacctgggctcgagaccataactgtttggctttaacagtacgtgggcggccggaatccgggagtccggtgacccgggctgtggtctagcataaaggcggagcccagaagaaggggcggggtatgggagaaggtgaggattgagatctggtggtgaacgtgggcgaaagtgaggaaaagaccattggatgaggccgggtgctgtggcttacgcctgcaatcccaacactttgggaggcccaggtgggcggatcgcttgagatcaggagttcgagaccagcctgggcaatatgtcgaaaccctgtctctacaaaaaatacaaaaattagccgggcgtggaggcgcgcgcctgtggtcccagctacttcggggggctgaggtgggagaatcacctgagcccggggaggtcgaggctgcagtgagccgtgattgtgccactgtactccagcctggactacagagtctcggtctcaaaaaaaaaaaaaaaaaagcatatgagacagaacccagaagagccagacctgggagaagacggggcctggcaaggtggagggtgtgggagtagaagaaagaagcagtgggggaaatgagcgcggtgtgggagttgcctgaactggggaggcgacctgggcaaggtgctggagaggggcgtcttgggtgggggcgtggccactgtgcggggctctgaccccgacccttgccacagcctccccacctgcccccgcaaggcggcatctgctggtcctgctgctgctcctctctaccctggtgatcccctccgctgcagctcctatccatgatgctgacgcccaagagagctccttgggtctcacaggcctccagagcctactccaaggcttcagccgacttttcctgaaagtaagcgatggcggggggatgggggaagaagtactgagaagaggttcagggacacagagtgggagatggttcagggccaggcagggggacagacaggatgagagggcaacagggagaccaagagataggaagagggaagggactgggcccaggctataatcacagcactttgggaggctgaggcagaaggatcattggagcccagtacttggagaccagcctgggtaacatagtgagaccctcatctgtacaaaaaaatataaaaaatagttgcaggtacatgcgcctataatcccagctgcttgggaggctgaggcagaaggatcccttgagcccaggaggtcgaggctgcagtaagccatgatagcaccactgcactccagcctggatgacagaacaaggagaccctgtctctaaacaaataaatatatacgtgcataaataagagaggaaaggtaacaggcaaagagagaggagatgggacagagacaagagactggggaaagagacaggaggagagggggatggggacagaagaggaacagggatagtaaggcaatgggactgagaatagagagagaattcatgggggatggaggccggaggttaggccctaagtatcagagggcagaaagtaaaggggatgggagggacttggggcaaggcctcgggagcatcctagcagggctgcagaaggggctgtactgaggagatgtgaggtccagcagctcaccagtccctcctccggccccagggtaacctgcttcggggcatagacagcttattctctgcccccatggacttccggggcctccctgggaactaccacaaagaggagaaccaggagcaccagctggggaacaacaccctctccagccacctccagatcgacaaggtgcctatgcagggaagcccttcctgaagtccccttgggatccctccatcccgccatccctcgtgctgcagtatctgttgggagggaaggagggcggaggaggaaagcaggtttgctctcactctctcatcggatcctcacagatgaccgacaacaagacaggagaggtgctgatctccgagaatgtggtggcatccattcaaccagcggaggggagcttcgagggtgatttgaaggttaggacgtgccccgccgtcaaagtgtccaggcccaaacattttctttttttcttttttaaagaagagtctcactctgtcacccaggctggagtgcagtggcacgatcttggctcactgcaacctccgcctccgaagttcaggcaattctcctgcctcaagctccttggtagctgggattacaggcacctgccaccacgcccggctaattttttgtatttttttagtagagacagggtttctccatgttggtcaggctggtcttgaactcctgacctcaagtgatctgcccatcttggccttccaaagtgctgggattacaggcatgagccaccatgcctggtgaggccctaacattttctgtagtttaggaggacaagaagaggaactgaccctcttactcctctgtgtggaacttcctccttctgagcctcagttttgccatctctcaagtggggcaatccaactgtcagaaatgagatttttgacctcagaatacatctgcaagggtttagtagaccctagagggttttgtatcaaagtggttttcttttttttttttaactacataatagtcaatcaaagtgtttctatgagcaccaaaatgttttataaaccaagaagggtttttaattctaagtgcttggaaagcttcaccctcataaaccccaaattgtgtttttgtctcaaagtaagtgctctgcaaacttcagagtatttttcaatctatcccaaagtggttggtaaacctctccattataaactccaaaatgtttttgttgttattgtggttttgatttttggggttttttttgtttgtttttttggtttttttttttgagaatggagtcttgctctgttatccaggctggagtacagtggcacaatctcagctcactgcaacctccaactcccagactcaaatgatcctcccacctcagcctccggaatagctggaactacaggcgcggaccaccacacccagctaatttttctatttttagtagagacggggtttcgccatgtttcccaggctggtctcgaactcctgagctcaggcaatccgcccgcctctgcctcccaaagtactaggattatagacatgagccaccacacctggcccaaaatgtgattttcttcttctttttttgttttttttgagatggagtttcgctctgttgcccaggctagagtgcaatggcacaatctcagctcactgcaacctccgccactgaggttcaagtgattctccagccctagcctcccaagtagatgggactacaagtacgtgccaccacgtccagctaatttttgaatttttagtgtagacagggtttcgccatgttggccatgttggccaggctggtctcgaactcctgacctcagctgatccacctgcctcggcctcccaaagtgctgggattataggcatgagctactgcgcctggcccaaaatgtgatttttaataccaaagagctgtatgaatgctaaatgcgttgtgtatttcacctttggtaaacttttttttttttttttttggagacgaagtctcgctcgtcccccaggctggagtgcaatggtgcgatctcagctcactgcaacctccatctcccaggttcaagtgattctcctgcctcagcctcctgtgtagctgggattacaggtgactgccaccacacctgactaatttttctatttttagagagacaaggtttcatcatgttggccagactgctcttgaactcctgacctcaggtgatccaactgccttggcctcccaaggtgctgggattataggcgtgagccaccatgcctggccaggccacctttggtaaacttctacaagtgattctaattatgaagtgctttgcaaaatcagggtatttttaatcctgaaaagttttaagaaacccaaagagcttgatacatccatatgatacccacgtacacccatgcaatatcttcattttaaaaatgtttatttaaaattttattttaaaaatttcaggacaggcacagtggcttacacctataatcctagcaatttgggaggctgaggcaggaggatgacttgagcccacgagtttgagatcaccctgggcaatagagggagtcttcatctctacaaaaaaatttaaaaagtaggccaggcatgctggcttacgcctgtaatcctagcaatttgggaggccaaggcaggcagattgcctgagctcaggagttcgagaccagcctgggcaacacggtgaaaccctgtctctactaaaatacgaaaaattagccgggcatggcagcctgcacctgtagtcccagctactctggaggctgaggtaaaagaattgtttgaacccgggaggcagaggttgcagtgagccaagatcatgtcactgcactccagcctgggggacagagtgagactctgtctccaaaaaaaaaaaaaaaatcaaaaaagtagccaggtgtggtggtgtgtgctgtggttccagctacccagaagcctgaggtgggaggattgtttgagacgaggaggttgagtctaaagtgggcccagatcatgccactgcactctagcctgggcaacagagtgagactctgtctcaaaaaataaataaataaataaataaataaaatttcaagactacagaaaagttttttttaaaaaacatactttattattttggaaatggagtctccctctgtcacccagactggagtgtagtggtgccatcttggctcacagcaacctccaccttctaggttgtggaaagtaaaaaagtttctctttaaagtttttattaaataataaatcacaagtgttagaaataatatttttaattaactttttttaagcctctttgctttgtgttagtaactcttttttaaaccatatcttatgtagttgttagatataaggaaataagtaccttctgtgtccttgtacgttaaccaagatatttggtctcgacgtgctcaagcatgtcccagctcacagcttatgccctttccttatttggaaatgttattacttctccaagtcttttggcaagcaacttcctcttttcctttgttctccattgcctttacctatttaagaaagttttttaagttgttagccaattgggtttagcttagactgtgaggtccagctccaaccaatggagacaggacacagcagtaaggacccaatgcataagggataaatattcctgcctttctttgttcattgtgctctcctggcaggattgctgatgggcagcaccctttctacagaaagtaaaattgccttgctgagaaaactttttgtctgaatgctaatttttccttgcgacaccaagaaacaagcattttgattctaacacaggttcaagtgattctcctgcctcagcctcccaaagagcagggataacaggcacgcactacaatatccagctaatttttttttgtttgttttttgttttttgtatttttagtagcgatgaggttttg[132 bp omitted]ctgcccaccgagctactctgttcctggcttagagaaccaggagaaggggaaggggaatcacctgccacatgctggaggttggagcctgtggcaccatggcttgcctcactgcagttggtggtggcaacagaggctgcagtgtggccagagtggcttttctggctttgcccgcccagccactctgagaaaggctggaggagaaagtgaaggaggagtcacctgtggtgaggtggagtttggagcttgcagatggcacggctctgtggctcacctcctacagttgtggcggtgacagcgagggagacttcagcctgactggagtagaagggtgctcgtgaaggctagagtattgcctccaagatgcagcagtggatactcaggtttcaggagactccactgtccatggcgaatccatggtctgccagcgcagttttagagagagaatgtgccaccgcaggtgtcatcctcatgtgcaccctggcaggtagccatctgaagatttcaaggacaacctggcaggggagcagaccagcgacacttcctctgaacaggttcttgctgttcacttgacagactcagcaactcaggcaagtgttcacatggaagatatcctggaaggataccaagccagtgaaagctcagatgaaaatgccccatggctttggaaggccaatgaatgtgccaaggaaaaaggtgccatggaggatcctctggaagacctcgccaatgaaatttcagattaggacaccccactggatttgaaggccaaagaacgtgccaaggaaaaagttcccatggaggataccctggtggaagaccttggaaacgaaagctcagataaggatgcctcactggacttgaaggttgacaaacgcatgaaagaaaaagttcccacagaggataccctggtgaaagaccttgccaatgaaagctcagatgaggacgctctactggattgaaggctgatgaattcaccaaggaaaagttcccacggaggataccctggtggaagaccttgccaacaaaagctcagatggggatgttttgctaaatttaaaggctgacaaatgagccaaggaaaaagttcccatggaggataccctggtggaagacctcaccaacgaaagctcacatgaggatgctccactggatctgaatgccgacaaatgtgccaaggaaaaagttcccatagataatccagtgaaagaatttgccaacaacatcaaggaaaaggaggccccatgtaatgtgaaggcaccctagggagtccaggtaaatgatttcaaggatgacctggcggggatggtgatcagtgaaaagtccccagaagcagccctatctcttcacagggcaaaatgagatgccaagaaaaaagattgcttcgccattcttgtagcagagcttcctgaagagatgtcctcagggcaagtgctggccgttgtcaccgtgaaaggcatcaagaaaaatggtggctctgaggacagcttttctaaaaccagtaatgacaaagactcttcctgtagtggagacactcaagcttctggagcagatatggaagagtccaatcatgcagatgaccatcagcatatgccaacaagtactctcccagcacctgcagaaaaaacaatagagacaaagcctgaaaaggcagaagaaatgtaacccagtgagttcaaggaggatgaggatgctgaagagcctgacctgacctgttgtgacctttgttttttatgctagaagtccctacagattttttgaacacctggaagggccgggtcacaagacctcaccctggcccagcaaccatctggaccgtgagagttttggggattttgctactctctctggacttttacattctcttaattttttaaaaaatattctttctttaacctgttttaagatgcaagctgtcattgcgtcatcatagttacattttattactcaaataatttttcaattgttttactagttttttttggatctttgtccactggttttagagtttttgtaattttgataaatgatcttttatgctttgtatcattttcttaatgacttaccttagtttttaacaaatccatggtacagtaagttatattaagacatagtatttttatgtttttttaaattatactttgggttctggggtacatgtgcagacatgcagttttgttgcataggtgcatgtaccatggtggtttgctgtacccatcagcccgtcacctgcattgggtgtttctcctgatgctatccctcccctgaccccccaccccccaccgacaggtcctggtgtgtgatgtttcccttcctgtgtccatgtgttctcattgttcagctcccacttgagtgataacatgcagtattttgttttctactcttgtgttggtttgctgagaatgatggtttccagcttcatccatgtccctgcaaaggacattaactcatccttttctgtggccgaatagtattccatggtgtatatgtgccatgttttctttatctagtctatcactgatggacaattgggttggttccaattctttgctattgtgaatagtgccataataaacatgcatgtgcctgtgtctttatggtaaaaaaaaatagtataataaatatccctatagtctcttttccataaaccaaaatttcttaaggttggcatcattggcatgtggggctggataatctttattgtgggagctgccctgtgcactgtaggatatttgataacatccctgggctctatccactagagagaagttgcctcctgccaggcacagtggctcatacccgtagtcccagcactttgggaggcagagacgggcggatcatgaggtcaggagttcgagaccagcctggctaacgtagcgaaaccccgtctactaaaaatacaaaatatggggccaggcacagtggctcacacctgtaatcccagcactttgggagaccgaggcaggcagatcatgagatcaggatatcaagaccatcctggctaatgcggtgaaatcccgtctctagtaaaaatacaaaaaaattagccaggcatggtggcaggcgcctgtagtcccagctactcagaaggctgaggca[225 bp omitted]accccgtctctactaaaaatacaaaattagccgggcatggtggcacatgtctgtaatcccagctactcaggaggctgaagcaggaaaatcgtttgaacccagaaggtggaggtcgcggtgagcgaagatagcaccattgcactacagcctgggcaa[138 bp omitted]atggtgaaaccccgtctctactaaaaatgcaaaaattagctggcatggtgccatgcccctgtaatcccagctactctggaggctgtggtgggagaatcgcttgaacccaggaggcagaggctgcagtgagccgagattgtgccactgcactccagcctgggctacagagtgagactccatctcaaaaaaaaaaaaaaaagaacacagtcatgttggattagggcccaacctaatgacctcatcttcaccaattatatcttcaatgaccctagttccaaataaggccacattctgaggtattacaggttagaatttcaaaatatgaatttggggaggaaacaatatggttgtttgttcgtttgttttttaagcctgggtcttgctctgttgcccaggctagagtgcaatggcacaatcttgactcactgcagcctctgcctcccaggttcaagtgattctcctgccttagcctcccaagtagctgggattacatgagcgcgccagcacgcccagctaattttcatatttttagtagagacaggattttgtcatgctgtccaggatggtctcaaactcctgacctcaagtgatctgcccacctcagcctcgcaaagtgctggattacacacatgagccaccgcgtccagccaggaggaaacaatttaacacataacaatctcctgcgcggcttctcagacctcatcttactaaaaggcagactgattcagcaggtctgagtggggtgggacctattaatttgcatacctaacaacagcagcccaccctttgaattgcaaggaccaaacagacactcagtccatattcaaactttctccctcaactcaaagctgtccttgaaagctttattttttttttttcccttgagatggagtctcgctctgtcacccaggctggagtgcagtggtgcgatctcggctcactgcaagctccgcctcctgggttcatgccaatctcctgcctcagcctcccgagtagctgggactacaggcgcccgcaacca[138 bp omitted]cctggccccttgaaagcttttgattcaggatcaatgaaggatcacacattgcatttatggtcatgagtcttcggtaaacccaagagcttttagtcctaaagtgctttgtacatttcaaactgctatcctctaaacctcagagaggatttaatcctaaagtgctctagaatcccaacaggcattataatccctgaagtgctctattacctcccttttgaaagcccccaaacaaattttccaatcccaaagcattctgtaaacctcagagtatttttaatccttaagtgtaaacccaagtgctttgtaaacctcaaacagggcttttgaacccacaaagcatcctgtcatctgcaaagtgggctgaataggtcagtggggactgaccatcctggggtgctgtttggagtatgagagggtctccttgttcttcctccccaggtacccaggatggaggagaaggaggccctggtacccatccagaaggccacggacagcttccacacagaactccatccccgggtggccttctggatcattaagctgccacggcggaggtcccaccaggatgccctggagggcggccactggctcagcgagaagcgacaccgcctgcaggccatccgggatggactccgcaaggggacccacaaggacgtcctagaagaggggaccgagagctcctcccactccaggctgtccccccgaaagacccacttactgtacatcctcaggccctctcggcagctgtaggggtggggaccggggagcacctgcctgtagcccccatcagaccctgccccaagcaccatatggaaataaagttctttcttacatctaacaacaccatctcctttcactatttatccccaaccgcctgccaaccaggccatggcaaaggcccccagtcccagctctgagcatgagagctggctgtgctagctcttgcctaagtctcccaggcttggttttctcattcaggcattgtctgtgctgtagccccatctgtccactcagcacccaaccctgtcacctccagccctgtctgcactcccaactctcagctatttttttttgctttttttttttttttgagaacagggtcccactctgttacccaggctggagtgcagtggcacaatcacagctcactgcagccttgacctcccaggctcaggtgatcctctcacctcagcctccccagtagctgggaccacaggtgtgcgccaccacgcccagctaattgttgtattatttaacatagggatctccctgtgttgctcagggtggtcttgaactcctgggctcaagcgatcctcccacctcagcctctcaaagtgctgggattacaggcttgagccactgtgcccggcccccaactctttcactccagtcctctctacttggcccccgtactgttactgccataaaaatgggcacaaacttggcaacttaaaacaacacaaatgcattatttcacatatcatcctggtcagaaatccaggatggctccgctggccctcagctctgggtttcacagggtgtcagccacccgagctctcattgggaggctctgggaagaagctgctttcaagctcattcagattttaagcagaatcgagttcctgggcttgtgggactgaggtccccacgttcttgctggctgtcagctgggggccacccatgcttccacgcttagctccaagaggcctctctccagttactgcaggtggacctgacatcccagagccacagcccagtatcatggcgggactctgacttccccttgtgtcccatctctggtatgccttcctcttctggcagagacagtcctctgctttgaagggctcatgtgattggactggacctaccgggacaacatatttacagttttcaggaattatggggtgatcatctttgggggaccactatccagccccactcaggtccttcccatgtcatctccagcctcgactctgtggtgtccacacccacctatccttgtcttcatcttctcattctctcactaccccctgacggagagactccatctccaacttgctatttctctctctttgtccctctatctgaccctccctgctcaccacctcaaactccctcacttccaggcctgatgccacgtccaaacttggaagctcacagagcttgcctgtggtggtctgtccactttgtccttcctcagagcatttcctgtcccctctgagaatcctccgtcatgacccatcaaggagaaagctgatctgatcctccccagtgctgagtcccatctaggacccggacacggcatgtactctctcccttgaagcccaagctgagcgctggatcaccccatagactcacacactcaggaacccaacagtgagtacaatgaatacaagtcaacttttttttttttttttgagaccgtctcgctctgtcgtccaggctggagtgcagtggcatgatctcagctcactgcagtctctgccaccacccaagttcaagtgattctcatgcctcagcctcccaagtagctgggactacaggtgctcaccaccacgcccagctaatttttgtatttttaatagagatggggttttaccattttggccaggctagtttcaaactcccaacctcgggtgatctgcccgcctcagcctctcaaagtgctgggattacaggcatgagccaccacgcccggccaagtttggctgcttctaaggcctctctccttggcttgaggatggctgctttctcactgtatcctcacattgtgtctttttgttttttttgtttttgagacagagtctcacactctgtcgcccaggctggatggagtgcagtggcgtgatctccaccttccaagttcaagagattcttctgtctcagcctcccaagtagctgggactacatgcacgcgctgtcatgcctggctaatttttgtattttttagtagcgacagggtttcaccatattggccaggctggtcttgaactcctaacctcgtgatccacccacctcggcctcccaaagtgctgggatgacaggcgtgagccactgcacccggcccacattggcttttatttgcaattctagaatagggcagtacctcattctataaagtaaaatgagtgttcccatgagccgagcagagaagggttgtttacgatctcggctcactgcaatctctacctcccgggttcaagcgattctcctgcctcagcctcccgagtagctgggattaaaggctcctgctgccacacccagctaatttttgtattttttgtagagacggggtttcaccatgttggccaggtggtcttgaactactgacctcaagtgatccgcctacctcagcctcccaaagttctgggattacaggcgtgagccaccgcacccagctaatttttgtatttttagtagtgacagggtttcatcatg[133 bp omitted]tattacagaacaattattatctgtcatcaaactatcctttcagattcattttgaatacctcctttcttttttatttttctttgagatgggagtctcgctccgtcgcccaggttggagtgcagtggcgccacctcggctcactgcaatctttgcctcccgggttcaagtgattctcctgcctcagcctcctgactcactgggactacaggtgcctgccaccatgcccggctaattttttgtatttttagtagagacaaggttt[132 bp omitted]gtggccaggtgtggtggctcacgcctgtaccccagcactttagaaggctgacgcaggtggatcacctgaggtcaggtgttcaagactagcctggccaacacagtgaaaccacgtctctactaaaaatataaaaaattagccgggcatggcggtgggtgcctgtaatcccagctactcgggaggctgaggcagaagaattgcttgaacccaggaggcgaaggttgcagtgagccgagatcacaccactgcactccagcctgggcgacagagcaagactccgtctctaaaaacaaacaaaaaaacaaacaaagttactttacttgtaaaggttaaaacagaggggacttcctcatcatgctagctagaagatgtggctattatctctctctcctgtctcccctaaattctcagaggtcatataacttagtttcagcttgctgacatggaactgtaacatgagtgactccactggtctcttgggcctagtgcaggagctcggtccaaaccaatggcttcctgtaaaatttatttaacaaggcaaatctacagagacagaaagcagattcatggttatgtggggcttcacggaaaggaaggttgagttaggaataatggctaagagatgtagggctttgttttggagtgatgaaaatgttctaaaattaattgtgatgattgtagaactctgtgagtacactgaaaaccactgaattatacactttaaatgggtaaattatgtggtgtgtggatgataactcaataaagctgttaaaacaattagttaattaataattctattaaacagtttaccctgaacaactcagggcttaggggactaaccccctgtgaggtaaaaaatctgaagatcaattttgactccccaaaaacttaatgactaatagcatgctattgaccagaagctttacataaacagtagatgaacacatatattttatgatatatgtttttggggattttttttttttttgatacaggatcttgccctgtcacccagggtggagtgcagtggcacaatcatagctcactccaggctcgacccccctggttcaagcgatcccccctcctcagcctcccaggtaggcaggaccacagataaggctctcacaaccacacctggctaatttttgtatttttagtagagatgagggtttcaccatgttacccaggggtgtctccaattcctaggctcaagcgatcagcccaccttggcctcccaaagttctgggtttacaggcgtgagccaccatgcctggctgtgttatatgtattatatactatattcaaacaataaagtgagctagagaaaagaaaatgttattaaggaaatcagaggaagttaggagagggttaaaaaaaataaaatcgccgggcacggtggctcatgcctgtaaccccagcacttttagaggctgaggcgggaggaccacctgaggtcaggactttgagaccagcctgaccaacatagtgaaaccccatctccactaaaaatacaaaagttagctgggcatggtggtgcatgcctgtaatcccagctacgtgggattgttcaaggatgaactgtataagtcacaatggatctgcttctctgagcaaaccctaaaggataaagcattattcagcttgttgcagtctgccaatctaaaaagggtagtttcctgttgctttaattggaatgtttctggttactgatcttttgagctccttatcacatatttgttagttttttggatttccccttctgtaaattgcctgcttttctgtaaattcttggtcatttttttctgttgggttgttatctttttctttttgatttgtaggagttccttcaatcacctaccttttaatcccttgtcaattttatttttttattttatttattaattttttttgagacggagtctcactctgtcgcccaggctggagtgtagtggtgcgatctcagctcaccacaacctccacctcccagattcaagctattctcctgcctcagcatcccaagtagttgggattataggcatgctccatcacatctggctaatttttgtatttttagtacaaaaatacaaaatctcttggccaggccggtctcaaactcctgacctcaggtgatctgcctgccttggcctcccaaagtgctgggattacaggcatgagccaccacgcccagcccctggtcaattttagacaatgcaaatatcttccgctcgtccatcatctcatctctcatgatcttggcccttgggatccttgatgaatagaaacccttaatactgatgtaatcaaattaatttttttgacttatgattcatccttttgagatccctaaaagaagtcattaatactttcctacattttcttttattaactttatagttttaccttttgcatttagtgctttactagcagctggtctccactttacattattatgttatagaggaggaggggcctgaaagcctctcagtgctcaagatctttgaagacttaactgggcattagctcaattagagaggaagaaagcagtagaggatggggatggaccactatctcctgggcctcgcttcccccaagaaaatccatggacccacccacaaccactacatctcagactatttcagcatcttcctcccagtggcttcacacacctgggtgagacccccaacatctactcagttaccaggtctggtattccctgatatcatcctgattttttgactggaaaaaaagtgttaattcataagactttgggtttttttgggggggcaggggcaggcgatggagtctcactttgtcacccaggctggagtgtagtggtgtgatctcagctcactgcaacctctgcctcctgggctcaggtgatcctcccacctcagcctcctgagtagctgggaccacaagcatatgccaccatgcccggttaatttttataaattttttttgtagaaaggtggtttctccatgttacccaggctggtcttgagctcctgggctcaagcgatctgcctgcctcagcttcccaaagtcctgggattacaggcatgaaccaatgtgcccagacccccaacactattctaagcagtggggattaagcagtgaataaacaatgccccagcatcatgggatttggtgggggagagaaacaataaatatgtatcaagcaatggcaaatgctgtgaagaataaagcaacatgaggcagaaaggaaactctgaggggaccgagctcatcttagatagggtagtctctctgatatatacacagagggaggcactctgatatatacacagagactgaactggggtaatggagcaaatccggtccatggtaaatctggagaaagagactttcaggctgagggaatagcaagtgcaaaggtcctgaggttggaaatggcttggcttgatcaaaaacaaggaggccaaggtggacagagcagttattgatggagataaataggggataagatcacaaaagtagacgtagggtacaggagagcagaccatgcagggtctttggagcgtagtgaggagtttttatgttattctatttaaaatgggaagtgagctaagtgttacaattaaagaagtaacatatatgtatttactgatcaaaaagattatccggacttttgcttgtcactatgatggagtagctagtagctgactaactccccaccaaaaactataaaagctgaatacaagctaggcatgatggttcacacctgtaatcccaacactttggaaggctgaggcaggtggatcacctgaggtcaggagttcaagaccagtctggccaatatggtgaaaccttgtctctactaaaaatacaaaaattagttgggcatggtggcaggcacctgtaatcccagctactcgggagactgaggcataagagtcatttgaacacgggagatggggtttcaccatattagcaaggctgatcttgaactcctgaccttgtaatccacccgtcttggcctcccaaagtgctgggattacaggcatgagccatcgcgcccagccaaggaaattaaattctttccgagggaagataataccatccagtttttatattttaatttaaaaattaccagtcttgccaggaaacaagaccaaatgacagaaaaccaagagaaaaaacatacactagaagtatgtacccaaaggtgatccaggtattacagttctcagatacaggctttcaaataactataattaatatgttccccaaaaatagatgaaaagatggataatttcatcagagaactggaatctaaggaggagggagaatccaatataaattctagagctgaaaaataaattaattgaaataaaaattcagtagattagtcccacatcaggttagacacactggaaaacagatcaatagaaaatatctagattaaattacacagaaatagggtagaaaatacattaaaaacatatgagacatataggtcatggttaaaaggtctaatacatacatactggagtcctagaagagaggaaaaagacaatgaggaggaagcaatactaaagaactcctgggcaagaattttaaaaaactgatgaaagacatcaactcacagatccaaggtgggaggatcgcttgagcctgggaggtggaggttgcagtcagtcaagaatgtgccactgtactccagcctgcgtaacagagtgagaccctgtttccaaaaataaggcagaacgttgataattgctaaagctatgtgttaggtatatacgggttcgttatgtttactttatgtatgtttgagatttttttaatactgtataaagatatttttaagtaactgacactaaatactccaaataaaaggcacagattttctgatctacaactacatgcaacatggttgaatcttatatgacatttaacaaaagaaccagaaacaaaaatgtttctgtatggttttatttattctgaataaaaaaacaaataaagcttatctatgccattagaaattggggtaggccgggcacagtggctcatgcgtgtaatcccagcactttttgggaggctgaggtgggcagatcacctgaggtcaggagttcgagagcagcctggccaacatggtgaaacctcatctctactaaaaatacaaaaattagccagatacggtggcacatggctgtaatcccagctactcagaggctgaggcacgagaatcacttgaacccaggaggcggagtttgcagtaagacaagattgcgccactgcactccagcctgggccacagaaggagactttgtctcaaaaaaaaaaaaaaaaaaagaaagaaaaagaaaagaaattagggtaaaagttacccctaggagagtagggactggaaggagccatgaggaagaatcttggaggcaggtagtatgttgtatcttgatctcggtttagataacacagatgtgttcaatttctgaaaattcataaagcttatcacttatgatctatggactgttctatataaatattacacttcactaagagttttggtaaagtcaaaaatcagcagtcagcataaaacaaaacccaactatatgctgttacaagagacatgccttaaatataagcacacaaaaagatggaaagttacaggatgaaaaagataccctatataaacactaaccaaagaaagctggagaaatctctacatcaaagtagccattaaggcaaaaagcattgctagaagtaaaaaatgacatttcaaggtaataaaggggtcaagtcaccaggaggatataaccattctaaatctgtatgcatttaataatacagcttcaacatatataaagcaaaaatgacagaactgagagatggaaaaatccacagtcattcagtacaagaagcaaacagtgaagatattaaagatttgaacagcatgattgacaaacttgacctgacatagctgacctgcaggatacacactctgttcttttcttttttttttcttttttttttttttttgaaacagagtttcactcttgttgcccatgctggagtccagtggcacaatctcggctcattgcaacctctgcctcccaggttcaagcaattctcctgcctcagcctcctgagtagctgggaagacaggcgtgtaccaccatgcctgactaatttttttttatttttagtagagatggggtttcaccatg[137 bp omitted]ctgtctggcccaggctgtagtgcagtggcgcgatctcagctcactgtaccctccacctcctgggttcaagcaattctcctgcctcagcctcctgagtagctgggattacaggcacatgccaccacatctggctaattttgtatttttagtataaacgggctttcaccatgttggccaggctggtcttgaactcctgacctcaggtgatccacccaacttggccttccaaagtgctgggattacaggtatgagccaccacgccaagctactcttttcaaatacacatgaagcatttgctaaaatagatgaaatcgtggactataaagcaaatctcaacaaatgtcaaagaaatgaaatcatatagagtatgtttgtatgttttctgactacagtgaattaagtaggaagcaataataaaaagatagcagggggccgggcgcagtggctcacgcctgtaatctcagcactttgggaggc[137 bp omitted]ggctgaggcaggagaatcacttgaatccaggaggcagaggttgtagtgagcccagatcacgccactgcacccaacctggcgacaaagcgagactccgtctcaaaaataaataaataataaaaagatagcagggaagtcataaaatatttggaaagtaagcaatatatctctaaaaattatcactcaggtcaaattagaaaatattttgaattgataataatggaaacgtggccaggcatggtggctcatgccaataatcccagcactctgggaggctgaggcaggcagatcacttgaggtcgggagttcgagaccagcctagccaacatggagaaacccccatctctactaaagatacaaaaattagccaggtgtggtggtgcatgcctgtaatcccagctactcgggaggctgaggcaggagaatcatttgaacccaggaggcagagattgcagcgagccaagattgtgccattgcactccagcctgggtgacagatcgagactctgtctcaaaaaataataataataatagaaatgtggcataacaaatgtgtcaagtgtagctacagaagtttttagaaggcaaatgatggctctaaacgcatgtattagaagagatctttaaaaatcaaatgacctggctgggcacatgacctggcatcagcacggtggctcacgcctctaatcccagcactttaggaggccaaggcaggcggctcacccgaggtcaggagttcaagaccagtctggccaacatggtgaaaccccgactctactaaaaatacaaaaaattagccaggcatggtggggcacgcctgtaatcccagctactcagtaggttgaggcaggagaatcgcttgaactcgggaggcacaggttgcagtgagccaagaccgcaccactgcactccagcctgggtgacagtgaaactccgtctcaaaaaaaaaatcaatggcttaataacctaaaaatatcagtgacctaagcattcacctc[224 bp omitted]gaggcag[136 bp omitted]gggcttgagggcacatggctgtagtcccacctactcaggaggctgaggtgggaggattacttgagcccaggaggtggaggctgcagtgagctagggtcacattactgcactctatcctgggtgagaacctgtctcagaaagagaggaggggggaggggaggggaggaaggggagggaggaggggaggcagtggacgcggaggggaagggaggggaagggaggggaagggaggggaagggagggggaagggaggggaagggaggggagataaagggagggggaggggaagggaggtgggaggggagatgaggggaggaaagtggggggaggagaggagcagaggggaagagagggggaggggaggggaaggtacgggggaggggagatgaggggaggggagtgggggaaggggaggacaggagcagaagggaagggaggcgggaggggaggggaaggtacgggggaggggagatgaggggaggggagtgggggaaggggaggagaggagcagaggggaagggaggggggaaaagagagatggcacaaattattaatatccgtcaccacagatcttacagatattaaaaagattgggcatggtggctcatgccagtaaccccagcactttgggaggccaaggtaggaggatcatttgagggcaggagttcgagaccagcctaacataagaccgtgtttctccccctccaaaaaaagacaatattatgaactttatgcaaattatttgaaattttagataaaatggaaaaattccttgaaaaccacaacttaccaaaaccacaacttaccagaaataaaatagaacatctgaatagttgtatttttataaaagaaatagaatttgtaatttaaagtctttccacaaagaaaactctaggtccagatggctggtgacttcttccaaacacataaaaaataaataacatcaatcctacactagcactttcaaagaatagaaaaagagagaacacttctccacacattatatcagcatagccttgttaacaaaactcaacagggatctcacagaaaagaa[218 bp omitted]gaggcag[136 bp omitted]tctcagttcaattcccccttcctcagcccatttcaccaaagcctgaagcggaagagaaaaacacgagccccagcatggcgggcgcagccaccccctccttccaccaccagacaaactccgtggccacagcccacaccgccagcgcgcatgcgtgacacgcgtcggccgccggtttgcacctgcgtcttaagaggagtccgggcggggaggggcggggctcagacgctgcgcacgcgcactcgcgacccctcgcctccttttgctttttctggcgggaaaagctcacgcgcacctcccccaactcaactgccgttcgtcgttcgtggatgtccgttgtgtcccgagactaggacgtggctccaggtgcgccctgccccgcggcgaggttcccagaatggcccttcccagcccctaccgaaatcctagcgaagcccccccatattgtgggagagatacccctgcgtcagggccccccagatcctgaccacttgggag[133 bp omitted]ggggcaggagaactgcttgaacctggaaggcagaggttgcagtgagctgagatcgcgccactgcactccagcctgggtgacaagagtgagactccgtctcaaaaaaaaaaaaaaaaatcctgaccacatcccctcagatatactgaaaggagtccaccaggaaatcttatagttgacccccgaaatcctgtcagaatcgtctagaaattgtcagacttctccctcagagcctgccagaaactttccccaaaatcctattactctccccagatcagcagagccacctagactcgtgtcagagatccccagaaatcctggcaggtcccctcccaaacccagtcggacctcagattccgtcagagagcacagaagtccatcaaagacaccccagaaacggagaccccgaaatgcactcagagacccccgcagaaatcaagaccctccaaatccagccagagacccccagaaatccagtcagacccctgcagaaatcaagacccccaaaatccagccagagacccccagaaatccagagacccccgcataaatcaagacccccaaaatccagagaccccgaataaatcaagacccccaaaatccagtcagagaacccccagaaatccaatcagacccccgcagaaatcaagacccccgaaatccagccagagacccctgaaatccagtcagagacccccacagaaatcaaaatctccaaaatccagccagacactccccagaaatccagtcagagacccccccaaaatcctgtcagagcccttgaaagcccgccaaggcccacaccacccagagctcctgccagggccccatcctgcttcagtgtccccgtctcagtcccgtcagacccccgagatcaaccaacacccccggggtccctcaggactccatcccgaacccactccgtgcgccagggcccagccaaggccatcgcccccctttgcaccctgcagggtgttccagaccctggaagggcctctcttcaaagacccgtgtttccagaacggtggcagcgggctcacgtggcttggggagagcaggcactgggggagctgggtgaggacaggcgagcccaggctcgactggtggccccaaggggcgcccgtgcccgctgtgatgatagcagcgcccaggtctctctctagcccccagagtgcggccactaaggttttgggtcggcctgggtggaatggaggcaggatggggccccccaaactcctgtcactgctgcagggactgcccagagcagctgcaagtggggctggcagggatgaggaggaggtggcctgggcttgggggaccatgtacatcctgagttggaacccaggggagcagcaggtttggggccatgatgaggagagacctaggggttgcccgacggagagaaaagggacaggaagaggcaggagcttcagagactactcaatgccactctagcctgagggactggaacttagtccgggggcattagggagccatgggaggatcaggagcaggggcaagtcaggatcaaactcccatgagaagccagccggccaaatccaggctgatgtggcaagaatggcagctgcccagggctgtgtgggagccagacacggcccctcgcttcccggaagaggccacgtgaagccgaagcaggatgcaggagggcgtcccaggcagagacctgggcatgggagcggtccgcagctcagagtggctggagcatcatgtgcgatttggggtgctgaggtgggcggtcagccatgcagggccttggcgtcagggccagggtctcacccgtacccaggattcagggagccatggaagggtacttagcaggggaggggcaggtcagctctggggccctgtggggacagactggaggacaagcctggggataggaggctgggacaaaggccagggaagaggaccaggcagcctggaccggcggcaagccatgtgaagaaagggaggcagtgacctcccccacccacccactagcccctttgatgtcagccacctcgttctccagcccacacctccaatccataaaacaggtcagagcggagctgctcaggtcacagcgggggtgacaaacaggttgtgaggacccagaggtcctggggcacaggtggggctaggcaggccccgacccttggtggctgctctgaggacaccatttcctgcttctccttccaggagtgctcgggccagctggtccttttcccatccctccccatgaaggagggaggctggtagctttgccagcagctgcgccgcggcaggggtggcccatggacctgcccgagggcccggtgggtggccccactgcggaaagtaagtggctggaaccctatttgccccggggagggtgaggagggagccatgggtgaatgggtgccaggctgtgactcggggacttgggagaggtggctgggggtggctgagcctttgcatgggtgcagagtggaagggagggaagggactctggtagattaagtgcctactctatgcccgcccacctgtcactaccccttatctcctgtggggaggctggactgtgtgagagcgcaagcagccgcaccccttactccattcagatcgcggcccagatggcacttcttactttatgtaaagcagctgccctgtgacactctctcccctgccccgcttcatttctcttcacagtgctcacatctgtatgtcatgttttgtctctgtctcccctgctagagcatgagctccacaaggcagcgtctgttttattcactctggtattcccagtccctagagcagcgctgtcctgtggaagtataatatgagccacataggtaatttattattttttaaaagaaaaaaggaacaggtgaaatgaatgttgataatggattttccttatatagccagactaataccctgtatattatatatgtatacaggatatacatacatagagatatatatatgtatatagccaatatatagccaatataaaaaatgtatccagataatctgtttttttcatactaagccctaaagatctagcgtgtactttacactaacagagcatttcagtctacactcgcctcagttcaggtgctccagaaggagagactgccctgttggctgggaccccagagcaactcctgactcactgtgggagctcacttactgttgagtgaacggacggatgtaggttgaacgggtgtgaaagctggcttcagagggtggggaggaggcactggggttgcctctctgaaactcatctgccaagtgagagagcccagtctgatggggatggtagggcccctttcttagaggctcccaggcatccacggcacagcctgcgtctttttctacaaagccccagacctcaggaggctttccagataggagggtcagaggtagacaccagggtgtgggaaccagaggacaggctgtctagtgacagccatctaaacttcacctgcaccagcagagggcgtgcagccaccaggatccgggtggcaagggctgagacagcttcgagaggctctggaaggaaaggtaggaacacacccagaaggagagatggagacagaggaaggcaaagggaaaaagaaacagcagaggaaggaaagagaagacttagggaatggagagtctctgagatatgggaagggaagcacagagactgagatacagggaagaaaacggggacaagcgacatggaggcagagagacaggacgtggggaagagagactgggagaaagatagagagaaagagccaaagagaaatgtaacgaagaggcaaggacagagacatagaggagatagagacactgaggaaggagatcttcctgaggaacagaaatgacatctccctgggggaatcctgggatgcgacttcagacacatgctgatcctcagagccagcacgacctgatgccagtcctgagttctattcccagcttagctctctctggcaagcagccctgggtgaaccatctcattgggcctcagggtcctcgttcatgtaacatgagaaagacactgagagggctgggtatggtggctcacacctgtaatcccagcactttgcgaggccaaggtgggcggatcacttgaggtcaggagttcgagaccagccttgccaacagggtgaaaccccatctctactaaaaatacaaaaattagctgggcctggtagcaggcacctgtaatcccagctactcgggaggctgacgcaggagaattgcttgaaccttggaggcagaagttgcagtgagcggagatcacgctactgcactccagcctgggtgacacagcgagactccatctcaaaaaaaaaaaaaacagtgagaggaggaaaacagactggggctaaagccctggtctccccctaactgtgagtccacacgccccttcccaagggccaaacctaggagcataggttcaagacagagggggtgcaaatttcactcactgcagagaatcctggaagagttagagggatgagaaagttgactcatatgttaaacagggtgacctttggcgagttcttagtttctctatgccttagtcccctcatttgtaaagtagggattataatagcatcgattattattatgctagtagacagttcatgtaaagtgctcagaaaaggcctggcacctactaaatgctcaataagtgttcaattctattcttgagtccccaccacgtgccaggccttctgccaaagcctttctagattgtatctcattttctctctaggaaagaggtaacaccaaccccattttccagaggaagaaactgaggcccaagagaagttgagtccattgccccaggtgccaccacttgtctgaggccaagcctcggttgccccctggatctaccccgtcctgcagcctgtgctcagtgagctgctgcacccagctgttcaaggccagggcagggagcctagaagttcacttccagccctgggagagaggctgggccagcccagtggctcctgcagttgaggatctcttcctatgtcatggagcatttgttgagcacctgccatctgcaggtgttgtggctacaacagtagacaaatagaccccaggacgtgtgtgtgtgtgtgtgtgtgtgtgtgtgtgtgtgtgtacatgcgtgtgcttcacatacacagagctaactcagccctggtgaggaggatcactctacccacccccccagtagggaaaccgaggctctaacagaagagacttgcccacagatgtgcagctggactctgcacccaggtctgacacactgatccagctcataaccattccctcactgcccaccctgtctggtttaccctatcccttcatgtctcagcccctggccatgggctccaatgatgccacccttgccttagggatgcagggaggagagagacctggtccccagggtgggctgggagaccggagatgcagcaggcgggatcgatctgggctgcccatgcattattggattgttcctggctcctgggcccccccttcactctcagctcctcccagaatcctctcttctttgccctccccgaccctgtccctctctgagtccagcctgggaggctggagaggagaggaggaaagggtgatctcagagcgttcttctctgggctcctaagccaattggacacaaaaagacagcaggggggacttcctggtttgaaagatggggggaagtaactcagagaccctcacattgttgccccctcctgaagcttcctgctgttccccacccgcccgaactctcagtgctctgagtgaattccctccccgctacagagcccaggaggctgaggacctggggtcacccctcttccttccttattcttcccactggtgagctgagccctcttgtctccccagtgtacctccgggagcggcctgaggaggcaaggctgggaatgccggtcagcttggaggagcaaatactcaactccacgttcgaagcttgtgaccctcagaggacaggtggtgggggcatgaggggtgctggggaccagtgcgggcaggatggggtggaggctgggaactggggagcctcagagagaagactgggctaaggccccctcttgggggtattgtaagaacaaagtgggtgattatgggaagcttcaggaagaagaacgtggataatggggtgaaggccttttagaatgaggaaaacttgggggacgttgatggaagagggcagagttttggggtcgtgggataggggagggaggcagccaccatggtggcgtggggcatggctgatgctgtccctatgtccatcccctttggtttaccctgtgatggggggatgactgggccccatttccaggtgaaaaagtggactcagaggaggggaaagggcttgcccagtgtgtctccactgggccatggagcaggagtgccaccagcctagccagtgacatcctggtcccaagctgctgccagtccatacccatcactccccacctgccccagaccccctcactgcatgctctgtcacaggcactgtggctgtggcccaggtgctggcctacctggaggctgtgacaggccagggcccccaggatgcacgcctccaaacattggccaacagcctggaccccaatggggagggccctaaggccactgtggacttggacactttcctggttgtcatgcgtgactggattgctgcctgtcaactacatgggtgagtccccacatcttcatcctcctctgggaagtccttcctaagatctaacctcatacctgcttactggagccagcatcctttaggcccaaggacctactgtgtttggaatgaggctgtggagagaaaaatgaagagacgggattcagagggggtagatagggagtctgaggacaaaataatttggatgaggaagcagagggggtctgggagacagaaataaaatggggctggagaagggaggagtttggggctgacagaggtccctccccaacccttcaccaaacccactccttgcccctcctgcttttccatctggccacgggcacttgccatctggcctcaccctcctaccctgtggtgccagctctcacctgacccggtcccctcctcccacctgcaatccccctgcctgtggctggtgaggactgaggggcagctacagtggggcgctaagcctcatccctttgatacaggggattagagctggaagaggagaccgccttccagggagccctgacctcccggcaactgccatctggtgagattgctatatatagaatgaagcaggcaggccctgggtcagacagtgtggggacttaccacccagggcagagcaagggatagggtaggaaccagggacctttactgtagactagagctgtgagtgtggctttctaggtcctccgtcccttccttccgtgagctttgggtttcttttcttcagagggtggtttccaactcgttctcctcacaccagccctattagagaggcctacgaggccccgcctacctctgctccatcattaacatcacctctcctcactctagtccaggaattcacaggcccactggtcttgctgcccttcctcgaatgtgccccacttctgcccagcacaggtccttgctcaggctgttcccctccactccttgctccccaccctgctggactttttttttttttttttttttttttttgagataagagtttcactcctgttgcccaggctgttgtgcaatggcgcaatctcagctcaccgccacccccgcctcctgggttcaagcagttcttctgcctcagccttccgcatagctgggattacaggcatgcaccaccacgcccagctaattttgtatttttcatagagacgaggtttctccat[137 bp omitted]ccctggctagagttccttgctccccatgctcactcctagacttgtaggcctttccattggaacatccacctgcagaggaaatctgattatctagttagccactggcacctgggtttagttggctggtttgctcaccattgtatccccaggacctcacacataggaggtgctccataaaaaaagtggtcatgattacaggcgtgagcctgtaatcccagcattttagaaggccaaagtggaaagaacatttgagcccagtagtttgagaccagcctgggcaacatagtgagacaccatctctactaaaaataaaaaattagctgagtgcggtggcatgtacctgtggtcctagccgggacactgagtcaggaggatcgcttgagcctgaaaggtcaaagctgcagtgagccatgcattgcaccactgcactccagcctgggcaatagagcaggatcctgtcttttaaaaaaaaaaaaaaaaaatggtggtcatgttccatttctctagccatacaaaaaacggtggggaaggaagttctcttcaacctccttcatcaggcttgggggcccagggagggctgcaagcagaggagggactagaggccagaaggccagagaagaggctctggtgaggatccaagaggagaaagcaagggccggggcatggagacagagaggaggggtggagcagagagtcaggggcaggagggagaagtctgggctctgctggactgggggtgacagggagcaagggagccaggtccgcccagtggctgagtggtcggtgggggatctgggaaggggaaggtgaagtgctgcccagtgttgggtgtaaagaatgtggggagttagggttatctgggagatccagcctgagctcaaggtagaagacaagcaagagggctttacagtgggtataactgcagccccaaaagcccatgagattctccagagcacaggtgagggtggaggcagatggagtccaacctcagagccctggggcactttacgtttaagggttccagggaagccaacattctcttggctctctccctccaggatgcccagaagctgaggagccagccaacctggagagcttcggaggcgaagaccccagacccgagctgtacctatcctcacacccctccctgaccctcctgcccacaccctgtcccctccagcctgccgaggcccgggtagggcttgggatccttcagggaaatgaatgagggacggggctttgctgaaagttcagggagagcagaggagtctctctcctgtttatctttccccaaaagagccacatctccccaccaccagcacctacctcgacccggggaaatgagtcaggggctgtggacagtgacctgaaccccttccttgcccctagacaagccacagctgacctgctgagcagcctggaggacctggagctcagcaaccgacgtctggttggggagaatgccaaattgcagcggagcatggagacagctgaggaggggtcagcacgccttggggaggagatcttggctctgcgtaagcagcttcacaggtgggctggatgccacacccaccctccccagcgcccctgcctccgtcctccctgcagcagccggcctctatctcccatgctcgtgtctgcatcctgctctttgactctgtacctgtcctttcttttcccttttctgtttttatcttttgtgtctctctgattcttatctctcagcctctgttttggtctttttatctttcccttgagggttcagacttctctctctctcttttttttttttttgagacaggttctcactctgtcacccaggctggagtgcagtgggggtgatcacagctcactgtaccctccgcctctgggctctagcgagcctcccacctcagcttcccaagtagctgggaccacaggcccaccaccctgcttggctaattttgttttattttttatagaaatgagttctcactgtgttgcccatgctggtctcaaactcctgggctcaagccatcctcccgccttatcctcccaaagtgctgggagtacaggcctgagccactgcacccagcctagatttctctctttattctttaactctctgattcttcatgtcactcgccctttcatctctctgtgctttgtcattcttcatgtttatcgtggtctccctgttctagtcccccactctctctaggtctctttcccacttcctcagtcttttaggttaaaactgggtctctgtgcccacaccaggtctccttctcctcttttctctctgggtctctgtcctcccctctctctgggtctctgtccctgcctaccacctgggatctctctgttgctagtgtctctcagaatggatctgtctctgtgcttctctgccttcctccctctcgtatggctcatctgcccccacccgcattcagcacccagcaggccctgcagtttgccaaggccatggatgaggagctggaggacctgaagactctggccaggagcctggaggaacagaatcgcagccttctggcccaagcccggcaggcggtgggtctggcccaggggaaggaaggtgccctctctcttctttgtttcctggagtcagggcggcagagtgtgactatggagtaggaaggggcagaggtcacctggctttctccctctctccaggccctgctcaccctagactttttcaagcttacctgccatccttctcatgacaaaggagacagcaggagccatcagggcttcccagacccattcccccaggccctggttgtgttttcaggggtgggagaagggcaacatgggggcaaggaggctagaaatgaaacctttgtcctctctctggggttggtcaggaaaaggagcagcagcatctggtggctgagatggagactctgcaggaggaggtgagcggaggcccagcaccacccccaccccttccccagtccttaaggtcttcttgacaccactcccttctgcccccaacaccccagcagcctgtcttggggagacctcagaatgtcagtagtgtgggaatgtccctgaggttatatcacactgtgagaacagccgtggtttacaagagtgtgaggcatggggtcagcctacatggcttcaggctgaggccacctacataagagtggaccagtgcctcccttctctgtgcctcagttgcctcacctataaagatgaacaaaacaatggcatctgcctcagtggtttgtgtgagacttcaaccgaaggatacttgcaaagtcttgggcacaaggtaggacacataggatgtgctcactaaaagttatctagcattgtttctatattagtattttttacagtgaataaaacagccaggcacagtggctcatgcctggaatcccagcacttcgggaggcctagctgggtggacccctttagcctaggagttcgagaccatcccgggcaacatggcaaaaccttgcctctacaaaaaatagaaaaataagccaggcatggtagtgtgcacctgtagtccagccactcaggaggctgaggtggaaagactgcacgagcccgggagacagaggttgcagtgagccaagattgcatcatggcattccagcctggatgacagagcgagagcctctcaaaaaaaaaaaaaaaaaaaaaattggatttgaagtcaaccttgagttcaaatcccatctccgccacttacacaataggcaacctttaagcatgtgacttctccttctcaagcctttacttttagtttcttttttttttttttcttttttttttttttgagacagagtttcattcttgttgcccaggctggagtggaatggcgcgatcttacctcatggcaaccaccgtctcccggttcaagtgattcttctgcctcagcctcccaagtagctgggattacaggcatgtgccaccacacctggctaattttgtttttttgttggttggttggtttgtttgttttagtagagacggggtttttccatgttggtcaggctggtctcaaactcccgacctcaggtgatctgcccacctcagcctcccaaaatgctgggattacagacatgagccaccacacctgacctacttttattttcaaagaactggaagaagggtatctgttcagtaggcttgttttgaggattgacagcatttcactgagggactagcaaacaatatgaagagactgagttcagcttcacatttaattcaagccccgttccatccaagacagaaaaacatcatcttagttcattctgggcccacctaattttttttagattgaaacaaactcatcaattgacaatgaaacctgtcaccacccccgacctcaaggtggtatctaagttgcaggagactgatgcaggagcctagtgctctaggaggctgctgatcctcactcaatgtttctcctctctgctgttcatgagattgatgggttttgtccaagcgtttgtcaccactgtgtgctggcatctactgtgaggcccgcattgcctttggatctctggacataccatcttcttcatcttctggtggtgatcccttatctgggctgggactcttactccaccacttccacacccttccagagccagggaggtgatttggctactttcctgtgaaagggaagaggctggggtcactgcccaaagcccctgcctcatttccccaggccagggtgggtgctcatggtggggagatgtggcttctctggggaaagagaaacaggagagagattcctctgttctccctgagctgttagcaaagtccctgtccgtcactcatttccctgaaggatcccaaaccccacccaggccttgacagactggaggacacagggctggggtgggcagaggtctggagaggacccaccagtgaggcctctttgctttcacaagaaagtagcatctctattattctcacaccgtgatgattctgagagtgctctgggaagtacacgcaaggcctctcagatcacaagacttccagggctctgcggttctccatccataccctccacccctcatagctagccctgggttaggggaaaactctgggctcattttcagcctattctcttctctgtctgtcctgcattcctcccccagctctaaggatctctgcctagtccagacagatcatgtattcccaaaaaatatctttgtcctacatgtgcagtgttttttacactgaaatccaaaatctttctgctattttctggctcttccatgaaaactcacccccttggggcaatgggaatctcacagcaggatggctgtaccatgtgagacatggaatgcagcaggatgtgac[141 bp omitted]tgaagccccatctctactaaaaataaaaaaatcagccgggtgtggtggcacacacctgtaatcccagctactcgggaggctgaggcaggagaatcgcttgaacccaggaggcagaggttgcagtgagccaagatggtaccagtgtactccagtctgggcgacagagcaagactcagtctcaaaaaaaaaaggaaaagaaaaactttccggctgggcatggtggctcacacctgtaatcccaacactttgggaggccaaagcaagattgcctaggccaggagttcgagaccaacctaggcaacatagtgagagcccgtctctataaaacaaaaaaaaacaaaaaaagtaaataaaagaatgaaaggccaggcacagtggctcacgcttgtaatcccagcatcttgggaggccgagatgggtggatcatttgaggtcaggagttcgaaaccagcctgaccaacatggtgaaaccccacctctactaaaaatataaaaattagccaggcgtggtggcaggcgtctgtaatcccagctacttgagaggctgaggcaggagaatcacttgaacccaggaggcagaggttgcagcgagctgagattgtgccaccgcattctagcctgggtgacagagcgagactctgtctcaaaaaaaatttttaaaaatgaaaaactttccctgaagccccctggcagaacttcctgccttacagttcattgccattcagccattataaccagactacatggataatatggccactaatgggtccagaacgctccagggaagagaacaaagaaatgatgacttcaatctacacgacattcatttccttaaccagaggtttagaagaaggtggtctctgggaagaaggtggtctctgggaagaaggtggtctctgggaggtttggtggctccctggctgcctgtggcctcattattgcagatgactgcaacagcttcaatctcatgttctcattcaaagtaggaaaacgtggggcaaaggggagccatgaggctgggcgcggtggctcacacctgtaatcccagcactgtgggaggccgaggcgggcagatcacaaggtcaggagatcgagactatcctggctaacatggtgaaacccccgtctctactaaaaatacaaaaaataaataaataaataattagttgggcatggcggcgggccgctatagtcccagctactctggaggctgaggcaggagaatgtcgtgaacccaggaggcggagcttgcagtgagccgagattgtgccactgcactcagcttgggcgacagagcaagactctgtctcaaaataaaaaaaaagggggggggcagccaggaaatgcccctctcgtggctcctttcatcagaagcctctcaccccacccccagcagctcttacatctcactggccagaactggctgacataacgcccccagctgcaaaggagcccaggagaatatgtgacctttttcagcctctagagtggcaggtgaacaagtgagaaggggtgagaatggctgctggcttagctaaccagctgagcttcctgcatctgccaagatttccaccttgactcactcccatggctggggctgggacccatctgccctcagacagagagagtagatccctcgacaaaagcagaaggagtaagcagggtaaatagcaaccagcagtctcatctctacctcctccccaccaggaaggcctgctgccaggttgagtgccttgagcagcatctgggacaccctcggccctcgataaactggagctattcttggttccctcccctctaccttccccctccacacagctgcctacagagcatctatagattgagttctcaagttacagtagaataatgctggagtaacaagacactcagacactgaagatccaggcagccttcctgtggagaacctacagagctgtctcaggttactgcagaaggaggcaggagcagctgagtaaccaggttccctgccgagtggcccaggatctggcctgcaaatccctaccaggtggacagatgttgagacagcactcctttcccgtccttcctctgcccttcacctggcagcccaggcccactgagacagagggagagcagctgatggaggacttggagctggctggagggagggagaggctggccttggtgtatcccctggagtgccaagaggaggggcgtggtgaaagggaactctggactgcctccatgccccaaagtgcatttccccagtgaccacctcgctttgaaaccctgtgcaacttgataggtttttggtgcccctaaactttagactggaatctgggccattttatgttcaggtcccatttcatggctggcatgggctgccctctccggcctattgttttcccagctaactgccctcagccttgaagactcagcaacgcctcctcaggaagcctgttagtgctcccatggtacccaggctgtaggcctcaccagagcccacctcgtgcattgttacccgcttctgcatccatcgccacctctagagcctaattccctttgtgtcccattctcacccagggctgtgtctggctcacatgagagtctgaggattataaacagaatttggaatcacacagatttaggtttgagtccatttaccatgtgaccttgccaagtctcttagcctctctactcctttataaaattggaaatgattatactattaatagggcaaccagacttggcattactcctgaatggcacaatttgatatgtatagcaccacccaatcttgccaagaaattgaacaacagtctggacaaggccctggatctacctaccagtttataagaaataatgatagaggaaagtggtgaacataaccacagggaacaagagcgcaatcagcctaatctgaacgcaccaatcctacaggacaagggacctgctttcttccacagaatgagggcctgaagagtaccagggtcggggtggagggggcagaaattactgtcagattaaaagaagtaagacatttcaaccaaaagcaatgatggaccttgtttggaccctcaatcaaagtaaatgtaaagaaatctctgagacaaccaaaatgaaaaaggagcacaggcccggtgcagtggctcacccctgtaatcccagcactttgggagacc[135 bp omitted]gaggcaggagaatcgcttgaacctggaaggcggaggttgcagtgagccgagatcacgccattgcactccagcctgggcaacaagagtgaaactcctctcaaaaaaaaaaaaaaaaaagaaagaaaaaggagcacaaactttctagtatgagatgatactgagttattgttaattttgttaagtatgatagtggtattgtggttttgctaaaggaaataagtcctcaagtaggagataaatgctggagtaactacaggtgaactaatatgatgcctgcaatttgctttaaagtaatctacttaaaacatctggaggagagccgggtgcggtggctcacacctgtagtcccagcactttgggaggtggag[131 bp omitted]gaggcaggagaataacttgaacccgggaggcagaggttgcagtgaaccaagatcatgccattgcattccagcctgggcaacatgagggaaactccgtctcaaaaaaaaaaaaaaaaaaaaaattagctgggtgttgtggcaggtggctgtaatcccagctactagggaggctgaggcaagagaatcacttgaacccagaaggcaaagattgcagtgaaccaagatcgcaccattgcatgccagcctgggcaacaaaagcaaaactctggctcaaaaaaaaaaaaaaaaaatctggaggagaaacatctcagtttaaacaaaaccgagaaaatgcatataattattgaagctgggtgatagataatgtggataacaggctgcttatattgttcttttgattttaaaattggggataagaaatgagtcaacacatgcaaaatgctcagtaagtgttagcgattattaacctatctaatctttacagcaatcccataa[135 bp omitted]ctgcctcagcctcctgagtagctgggattacaggcacgcactaccatgcccagctaatttttttatttttagtagagacggggtttcacca[136 bp omitted]aattaaagctgtggtcccactggaatggttggaggaattaaatgggttaaaacatatgaagtgcttagcatgaggcctgatgtatatcaatcaagtgtttagcaaatatctgctgttaattttgacattaccacttgctggaatgaacgtgaccagccattccttcttctagaacgggaagctgcttgccgagcgggatggagtgaaaaagagaagtcaggagctggccatggagaaggacactttgaaggtgccactccttcctagtgcctgacaactttccaccaccccggggccatttttcccatttccggttttagtgactgcagcctgataagggcagggtcttccatcaagctgtcaggctcccaggaccacccaggcatccctaaaatccctgaagtcctggaacatctcaggaggctgaatacgtgggggtgcgagagaacaggtggggccaggtggagggcaggaccaaggggagtcctgggaggctggatggatggaccggctcctttcttggcagcggcagctctttgagtgtgaacacctcatttgccaaagagacaccatcctctctgaggtaaggggccccgggagggaaagagattcgctttccatgtgcaccagccacttcctgcccctggtctagaaagggaagtcctacttgggtctgatccttggatgtgcagctggagagactggagggtttccccaggtcccaagtgtgacccctcagggatctagaagcccttctgcccggtgctctcccttgtgccccagctcttccctcaagctcaccctgtcccttaaccccccagccagtccccccgccaccaccacccccagtgtctttggggaactggtcccagtctcatttggctttcggctttcctagcgcactcgcgatgtggagagcctggcccagaccctggaagaatacagagtgacgacgcaggtaactcagcggccctcgccacccaccgcggccctcgccacttctcttttgccatctctgggacttgctgcctctcctcctcgtgcctctttgtcagtggccacatcttgcttcttccatccttgatgtatgactgtatgactgcatgtctccccctctgtttctgtatctgccttttcactttttctctgttccttccattcactttcattctctgtgggtgtcttctcacacacctcctctccttatcttattttttttttgagacggagtcttgctctgtcgctaggctggagtgcagtggcacaatctcggctcactgcaacctctgcctcccaggttcaagcgattgtcctgcctcagcttcccaaatagctgggactacaggtgcatgccagcatgcccagctaatttttgtgtttttagtagagacggggtttcaccatgttggccaggatggtcttgatctcttgacctcgtaatccacccctcttggcctcccaaagtgctgggattacagacgtgagccaccacacccagcctcccctccttatctttatgtgtctctgcgaggctcgtgtgggttcctgtctctgcctctaggtctaggctgtctgtctccctaggcaagtcttctctgtttggctctggtctttaccagtctcttagccctcatgtttctcttgcctgtctgtgagtctgtttccatctatgtctcattttttcatgcatctctgcctctgccttccttcttttaattgtcttggctgtgctttttttttttctttcttttttgagatggagtctggctgtgtcacccaggctggagtgcagtggtgcaatctcggctcactgcaacctccacctcctgggttcaagcgattctcctgcctcagcctcccaagtagctgggactacaagcgtgtgccaccatgcccggctaattttttgtatttttagtagagacatggtttcaccctgtcagccaggatggtctcgatctcctgaccttgtgatctgcccgcctgggcctcctgaagtgctgggattacaggcatgagccactgcgcctggcctcttggcctgtgctttagcttctggattcctgttgctctctctctttggcttcctaacattctgtcatggctttcttccccttgtccctaggcagtatgtgtctggggagcccaaagtagtcaggaaaggggaaagaaccctggaagaggagcccagaggtggatgggagggtgggaaaaatgcagagccaaatgtgctccccacttcctcctttgcaggaactgaggctggagatttcacgcctggaggagcagctgagtcagacctatgaggggcccgatgagtgagtggaatttcaaggggtaggaggaggcaggaggggagcctaagggcagggacaccctggcctccagccccaaggtgggcagggaagggaggccagcatgagctgactgagtggccaccaggcacagaggccatcttcctccctccttcctgtgtggccaggctacctgaaggggcccagctgagaagagtgggctggaccgagctgctacccccatcgctgggcttggagatcgaggccattcgacaggtgggcctaacacccctggaataagctgcaggccaccaaggcagaatctccaaacatctccctactctgatcctcacaccagcctagccctaacccacattgctgccagaggctcctatcgcaaccttagcttttctctaactctctctacctcggatcctaaccccaaacccactgccagacccaggcctgtgccagaccccagtctgatccagctttgactcacccctatctcgtctccctccatgaccatctcactccttaacttcatctcgaacctagaccttggtcctggcaccaaatcctcccctgttcctgcttctgcccactccccaaccccagccccacaccagcccttttctatctctcatcctattttcagccgcacacctaaacctatttctatctctgaccttgttttctaccttaatatggctctccctgacctcggaaacaacttctgtcccagaaacaggaagtggcaactgctgatctctccaaccctctgtgtggggtgtggcagtgggaggaagtcatccatgagaccagtgaggaaactgagtttccatctgaagccccagctgggggacaggtgagcacaggaaaagctctgaagtccaggagctggaaaggggccaggagctccaggtgccgccctggccagcccattcactcacacttttgcttgttccccatttgatgagaaaatgttaattgagggcccagtgtgtgctggacacccagccacaagccagaccagacaccacccctaccccagggactgacctgccagcgttgtagacaaaggtgaaccaagcaaacacacaagttgcactgtggcttttattgttggtttgttttttagaaaacactcttgggaattacattatttaaaatcgtactactgtaggaagggaataagtaagttgtttattccagcattttaaggatatattaagcatttatgtttcaaatgttagcacctttaagaaaagccagcaagctcactatgacatctttaactcagcaataaccattggggttttttttgttttttgtttttagagacaggatcttgtcttattctgttgccaaggctggagtgaacttgactcactgcagcctcaatctcctggataagcaatcctcccacctcagcctcccaagtagctgggattacaggaacacaccaccatgactggctttttttttttttttgagatggagtctcactctgtcacccaggctggagtgcagtggcacgatctcagctcactgcaacctccacctcccaggttcaagcagttctccctgcctcagcctcccaagcagctgggattacaggaacctgctgccacacctggctaatttttgtattttttttagtagagacggggtttcgccatgttggccaggctggtcttgaactcctgatcttaggtgatctgcccgcctcggcctccgaaagtgctgggattacaggcatgagccaccatgcccagcctttttaaaatttttttatagagttgagatctcactgtgttgtccagactggtctcaaactcctgggctcaaactgtcctcctacctcagcctcccaaagtgctgggattacaagcatgagccactgcacctggcttttttttttttaattaattaatttattttgagacggtctcactcgcttctctgttgccccggctggggtgcagtggcattatcacagctcactgcagcctcaatctccctggactcaggtgatcctcccatctcagcctcccaagtagctgcaaccacaggcatgtgccaccatgtgtagctaaattttctattttttgtagaaatgaggtctccctgtgttgcccagtctggctgaactcctggggtcaagtgatccgcctacctcagtctcctagagtgctgggattacaggcatgagccactgctctgggctctctctctattttttttttttcttttaaagaaaatgttgtaaacagctctataaacaagctgtattgtcttgagaactgcaccacttcaaagctctttgccatccttaaggagagactcatttctctgatcactttttccctggtttgagaaaagcttttgtttctctttgacaccagagcttgtttgggttctcatttaactctcccagtatctctgtaaggcaggcatcctcatcttgttactcatgggaaactgaggctcagggagaaatcacatgccaatggtcacacagcttgttggggacagagcctcatccctcagaagtgtaggttagattgggcttctgctttgagctgtcagatgcccctgagagacaggcttgtcaaggggaagactgagccaggcctcagagtgcaacctgcgatgggcccagggatacagagctgagtcccttggggccgggcctctcagtgctcaaggcctgataggagagaccctgcaaatgggttgccccagtgcagaatgatcattgtgctagaggtgggggatgggcctgtgggagcccagagaaggggtatctgtgtcaggtcagagattggggaagatattgaaggaaaactgatacttgagtggaaggaaggaaggaaggaaggatggaaggagggagggagggaaggagggaaggaaggaaggaaggaaggaaggaaggaaggaaggaaggaaggaaggaaggaaagaaggaagccagcctttgaggcactagcacagcctgtgcaaggccttggcataaaatcacgatatgcttgaggagtagagggtaactaggggtgactagtgagagatgaggccagggccagatcatgaaaggaaatctctgacaagctaacagattgtacttttcttcataaagccacaagaagggtggggtcagctccgggcttaaaaagatccctctggaaccatgtgagggacctactggaggcagggaggaggctggagcaatggtgatgaagcctgagccaggccagggccctagggatggaggaaaagggacagacagacataattggggtggagggacagagcaggggtcagacgggatgtgggtgatggggagggaggaaaggaggcaagacttggaacttgtgaccttgtgaggtgaaatcttgagggatgtctgggggctgcctggaagagttgggtgcaccatcctggagctcgaggattgcgtttagaaaacaatggcaagttggttgctgaggtcaagggcaatgccaatatgtctctggagaaaccgagaggtacttgggtcctgagggagagcagatagatccagcccaagtctgggaacctgggatgagaaggcggttggacagggaaatgctgatctcctctgggacccagataagtgtacgagatctgtggaacatccaggaagtttaggcaaccgggactcctgggtcctgtcagggaagggggcttggtggcatcgagaacaaccctttggtttttggcttctgcccttagggggctaatagggccatcctcatgtagggcagcacgagaggagggcaggttgtagaaggtggtgaattcatgtgtaggttgcagcctggaagaccttttgtatatggggtctgggaccggcgggggagacagtgggcactgttagggttggagctttgagtgagaagaatcagagaagaactaacctttttgtttccacagagaaacttccagggagagccagcgcaccctgaagaaggaaggaaggagccatccatgtggtaaggagctgagccatccgtctgcctcagggtgacaccttattcacagctgtttacagtaggaggactggatgtgccctgaggggatcggcattcattcattcactccttcttcatgtcttccgggagcagaacctgggcctgtaggccaggagatgaggcctggccctgccctcaggtctaggaggagatctggttcctgaccctgccttgggggagggctcccagcgaggctgccatgcctgaatggggtgagggggggcctctggaatcagcgtggattcagattccagctcaggtactttgcagtcaggctggtgtaagcatttggttgtatgccgtgaagtcccagccctgtgattgggatgtgattgttaggaggctgtgtccaggcctctgaggatggagaacgcactagatgactgggcccaccctcctccggggccctggccttcgggcctctggtttcctgtgttgcttccctctccccctcccctctttcaggctcccagctgcggctactaatgaggctgcctgccaaggcctctaattggacttgtctgggaagagctgagattgggcgggatgggagctctggagctatgacctccctctgcgtcaccagagaaaggaggggagaaggggctgagcagtagtggaagtgggggaggcaggtgccatgcgagtttccagaggtcaggggcagtttgatccgcaggttggaaagctgggagtgaggaaggtggtgaatacaacggctcctaaatgtagccagctgtgagggcttggaccttgagaggggttgggtcccaagtagaagtttcaggggatcagatagtgtatgtctgactggggcctaagagcctggatcctttatcgcgtgggagcacagctgtattcctgagggtatctctgagggttttgggtctgaagctggtggtggtggcaactgcagggctggatctctggtccccagtgaaggcagtggctggtggtatggatggctgggtctctaaggggcattcaggctgggcagcttgaggcctgagtccccaaagcagcatttcagggactcagatggctgtgaccctaggaggggcctccctaggagcctcccgccgaggcagggtcaggagccagatctcctcctagaccgagactcgctgagggaagggtcaggtctcatctcctggcctacaggcccagggtctactcccggaagatgggaatgaatgaggggcatgctaacccctcagggctcttccagtcctcctggaagagggtcttgcacctaagaggattcggcatggggaagagctccaacagttgagttctgtgggctgggaggtctgagttggagtcccagtcctcagagagcacccagtgacagtcattgaaaaatggctcaacccactagacaggaagggggtttcgacacgtgctctggggtcttacagaggcctgaatctctggtattttggagggtgagagagccagaagcctcagttcccagctgggggatctgctggggaagtagtggctgagaaaaccaatctgagatgaagaggcccccttattcttttagtggttcacagaccctttgggtaatttggtgaaaattcctgtgaaaaatacatatgcaggacaccccccaggcccgtccgtgctgcctggcctcccccaggcccgtccgtgctgcctggcctcccccaggcccgtccgtgctgcctggcctcccccaggcccgtccgtgctgcctggcctcccccaggcccgtccgtgctgcctggcctcccccaggcccgtccgtgctgcctggcctgtgctaagaccccctgctccaaggcttctctcccagcccatagtaggcaaagggaaccagggagaagaggacgaagccagcagtgactttgttggccctcaggttgaccagaagagaggaagaggaggatgcagagagccaggtcacggtaggcagtccccagcacccctccccagtccccatccactccacacccacagaggctgagtcgtttcaactcttcccaagccccagcctcacactccaactcctcaggagcagagagaaaaatcatttggccaagagataacaaggcctttgctgtagctaatgagagcgatggtgaggtggggggaggcctggaggctagtgggcggccaggctgctcccaggggaccctcccagccacacacacagggctgcagccaccacaccgcaggcctcatagacgtggctacacccccggattgcataaatgcacacgcacatgcgcccacactcgggagaggttgggccggccctccccagccagcctcagaactccctgggggcgtagtgcccgcagcccccctgcctgcagccacacaggccagttcctctgctcctcagagcccagtgcccggtgggggttaagatttccattctcaggcaaggacggggaaagaaacttggtaaggagaggtgaggagccctcagttgtgagctgaggaatgcaggagctgggctggagtctgcctgttgtgggtcaggcactgtcagggcccctggggctcttcagggtccaaaccggccaagatggctgcctccaggacactcagctcccagcaccctggccccgaagcccacctccttcaacatactacactcccttgcagagactggggctccacctcagcttcctcacagctcacatgggcataatctcttccttgctcccagggtggggaggagggttaaggactatgtcataaagggcctgggtccctgcctggcacagcaggtggtagaggtgaagatattgattgtgattggtgttctgtttttatttactgccattatcattgtcattcatcatcctcatctgtgttaaaaaggtatgggggtaggaaagccaaagacccatagaggggaggcccttccggggagacatgggggatgaggcggtgcagtgggtggggcctggccctggaggaacagctggggctttgatctttgaatcctcagatgaagtgttggaattaatcagtgaatttagtgtggttgctgggtgaaagatcaaaataaaaaatcatatttcagtatagcaaccatgagcaattagaaaaataaatttgtaattataccatttataatggcatggtgttttgtttttggtttttgttttgagatggagtcttgctctgtcgccaggctggagtgcagtggtgcgatctcggctcactgcaagctccacctcccaggttcacaccattctcctgcctcagcctcccaagtagctgggattacaggcacgtgctaccatgcccggctaatttttgtatttttagtagagacggagtttcgccatgttggccaggttggtctccatgtcctgaccttgtgatccgcccgcttcagcctcccaaagtgccgggattacaggcatgagccactgcacctggcctgtaatggcatgtttttaattagtaaagcgcctgccgattctggcataggcaggaagacaggattcttcatgaggcccagcacaggggtgggcacctgtagaagatgtggtctctgccctcagagagcttagatacttccagaatccaatggaaaacggaggtgatgatattgaatagctcacacagacattgagcactcactatgtaccaggcgctgtccaagctattgcccccgccttttttttcctacattcactcatttagtctccatgttaaccctatgaggtggggacatccctggccagcagatggggaaagagcggcacggagaggtgtggtgacatgccaaggaccctcagccagaagctggcagaaatgggaacccgacctggcagcagaagtgcactcacttatctcctgagctccaccactttctatgtggccacttgtgtccagtgggctgacctgagcacctctcagtccagaacccggtgcctccaacgcatctcttctgtccttgcaggctgatctccctgtccctctaggagcccctcgccctggagacatcccagaaaaccctccagagaggtaataggacccacagggtccaggagggacactggggcaaggaaaaacccagtggtgattccctccttcaccccagcagacctgcgcggcgggaactccagcaagccctggtgcctgtgatgaaaaagctggtcccagtcaggaggagggcctggggccagctctgcctgcccccacagcggctcaggtgtgcccccaggcgtctccagaaggaaggaggtggtctgacattgggaagagcaggggctgcccagaccctgccctaaatgctctcccacctccccaccagagtcactcgacatccactgatcccagctcctgtcctgggcctgctgctgctgctgctgctctctgtcctgctgcttggcccgtccccacctcccacctggccccacctccagctctgctacctccagccccctccagtgtgagaggctctacttgcccctcagagcagtgtctagctcaataaatcccctggccctctctccactgggatccccattgttagtccactgttgcgcaggcttaccctagatagagtacaggggatccacatccctgtatttttatgtgaagtctcctagttttttaatgctgacatttcttaacaatagcaaaactcccccagtaatggattaagcactaaggattattccctcacaaaacaagcctggcgagggcagctgtgggcacacagctaagtctcggttgccttggggtcagggcctcagtgattctcctgtcccctccctcatgctcaggagttggcagttgtagcttcctacatcacatctgcgggaaacggaaatttcttccttcctttttataaagagaggcagtagcctcagtgtgcagtgggtagattcaaatcatattcataataaaagagaagcagttgcctgcccagagccaccagcagacttgtgtttgtttcactagccagactgtttggtgtgaccacccttaactgtaagggaggctgggagacctgggaggtcaagtacctctgcggggactgggtaccttgaaagtgccttgccacacacctcattcacactgaaaaacactgcaggccatggacctaacaaacactctgggagtcacctacacaccaccaccagtgtgcagctgctgagtggccttggcatgcatggccaagctgcttcgaagggctccaggatacctcttctccttgatttctttctccttcctaccttctctacagctctgccttgccctcccccgataggatcctgactctgtcctgccacccctccacgggtagcagcctaggttgacccagtcccaactgcatcctaagtcaataaagaacaatcttcttgggccgggcacagaatcacttgaacccgggaggcggaggttgcagtgagtggagattgtgccactgcactccagcctgggagacagagtgagactgtgtcttaaaaaaaaaaacaaaaaacaaaaaaaaaattaaaaaaacacatgcgagaccccaacccctccctcttattcacatggaccatctgcatggtgcagctctgaggcatcattatgctgtaagccccttcccagctggagtaaagctgaggacaccaaagggaagcagatggagtctgagaagcctaccctactcccgaaaagaatacatgattgggcacccactctgtgtggcatgtggcccatggtattatgcagggaatgccccaagctttgcctgcctcatagcaccgccagcaagatccttacaccatggctccaacgctccctgtaaacaacaagagtggacacccaggatggctggccccagggtgggagggcgctgagctaggcactttgagatatgtatttaatcttcacctcaacactaggaagtagatggtgctattattgctttacacatgaagacactgaagcacagagaagttaaatgacttgacctagatgtcacagctaaaaattatgagagttgggatccaaactcagtctgagtccagttcagcaaatgaactcacacggtggctgtctgctgtttgtagcagcctatgagttgaacatccttccttgcctgggaaaatcccaagataggaaggagacagggccccaccttcaaccaggagagtcaaaggagggtccccttccccagctcccagggggttgggctgctatgacaggcagtgtgtggggcccatgcccatccctgtggccaaggagaaggatcacgagattggcagccccaccagaccctccagtcacagctgtcgaaggcagcagcaactctacagaaaaaggaggacagggatgaggaccaggcacacaccagagttgtcctctagagtgcaaatggtaaacaggaaaagcaccagggtgccatttattcattcaacaaatatgtgttcatcatctctttgcaacagctagaccttagaagatgaagctgtagaggaaagcaggacctccaacatcaagctgaggagcttagattttctcctgagaatgatggggctttgggaggttttattgcttgtttgtctttggttttttacattttaattgaggcgcagcttacatacagataggcagacaaatcttaagtatcagctggataaacttttgtgtacgtatatacccatgaaaatcacagcccaggtcaagagagtagacagtttcagcaccccagatgcttccttggagagttttgagcaagggagggacagaatcggacctatttaaagacagatggaggtagctgcaggtcctgtgagagtccagaaaaggcaactgattcggcttggaggttacaggattctttccagacaagtgacatttgtgtttagtcttgaaagatgggtaaggtttgggttacagtcagcaggggcccagggagggtgtcatagaggtgggaaagagaccagtgtgtctggagagccataggcggcatcctgttgctggatttaaaaaaaaaatttttttttaaagatttggagcctgggagggattgaaggctacagagtggtgggaaataagagaggtaggcaagagcccatgaagggatttgaacaccagcttgaactttattccctagtgccggtaaaagggttgtgagcaagggaaggcagaactctgggtaggaagaagagcattcagggcctgtggaggagatgaatgaatgaaggggatgagaatggaggccagcaggtggggaggagtctggggctgtggtccaggttggagagaatgaggcctgaggcagggcatgtgggtggagaggagggaagagcagagccagggcagggtgggagggaccgggctggagactgacaagctgtgaaggatggcgaaaggggcaggacaaggacaacccctgggacctggcccagtgactagtagacagtggagccattcccaagatagggaacccatgataaggagtgagttcagagaaagactcagttcatttaggggctggagtcctgagccctgagctcccaggctggagaagggggtctgggtgttgtcagctgtgggtggtggcagaagctgtggggactgctgaatttgcttgagagtagagtggggagggaggaggctccagacaccattttgagcaaaacctcaaatgttctgatacggatcgggaagaaaatagagtgtgggaagagaccaggccagtacccagctaccaggcccgcggggaaacaggaggaggctcttcatagggtctttgtgaggttaaaagagttaatgcaagcacagcacttagaagagtgcctgctatatagcaactgctcattcacattttcattccatttctccatgagagtggcggaaaagtctagacttttgaaattgcacatacccggattccagttattcttttgtcgcttagtagctctaacaacttaggaaaattcctcctgactttcagtcttatttgtaaaattaggccaactccagatagttttgaggaatgcagtctttcctttgttattcggaaggacagaggaaacagtcccgcccccacagtccaagggccaattagggctcggtccgcctcccgaaaatgcaaattttgggacgccttgccaaacacgcgcggcggccccgcttcccgcgcagcagacgcggccggctccactctcttctttaaaccaatgagagcgcggtccgcacgaacggcgccccaggcgcgctgatctagccctctgcggaccaccgggttgccatggttaccacgaggggcggagctgaagggcaggctggacctccggggagagagacagatttcgattggctcttttctcgcttcacctgcagcccaggtatcttcccgccctttccctgtcctttttggagcctgacgcctgctcctttctcttctcctgccccagcctggcgccccgaaggtctctagagaaggagacccgaagtcagaaaaccctgaaaaaaattgctggacgctgctgtgagaagaggaaacccttttcaaataaaagcgttttgctacgtaacgggcgctgtactgaagtcttatgaagtatatcttattggatcctcgtaacagatgaagaaaaggagacacagagactgacgtcaagaaggctttctcagtactacgcagctagatttggaggaccctgggtttggatgctagggctgcctcacaccagagcccgcgatctttccactgtgcctggggagaagtctggaagtgatgggagggaggaacagcgaaattcaaagatgagagctgatggagagacagatagaaacctaacggaggaaagaaaaggaagatatgaaggagtcaggcagaggaaaaaggaaaaaagaaagtgatggagaagggaaggaagagtttcagaggcagaaggagaatagagagaggaggcagagattcccagaagaccagaaagccaaaagggtgaaaggggagataaccacaaggacccagggagacggggacacatacccagagaggaaagagacccagagaaagggacagagacggaggaggacagagaccttggagattacagagaaccagagagaaggggacagagatgggggtagggagggacaggggcccagaatgaaaggagggggcgggggggtgggggcgatagggaagcagagatccagaaataggaaagaagccagcttcctggacaaagacaggcagagagaaacggaattgaggaaagaaaatagagtggggactgaggagagagatgccagagtggccgacacagagtcctgtctcttttctaccccccatttcaagccccgcgcccccaacccaacgcacacgcaggtcgcgcaggaactaggcgcagtccggagcgcagggcatggtctttattaagatggggacgggcagcgcgctcagggcgcatccaacaccagcagcttgtgcatgtacgagttcagccagtggcggcgctcgagggcggccagcaaccgcgcgcgctcccggaaggccgcgtcgtccgccagcgccaggctcctccgcggcctgggggtggcgggatccgcccaggcccgtcctggggggcggaggctgtggagagacgcggtgaccgcgcgtccagactcgctcttgccgccgcctgtcctccccgcggtctaactcgaagccccgttactgcccagtccgtggagtggctcggtccggctccccctgtctctctcgttctctgtgtgggtctctgtctctctgctcaccaggttcgaaactccccaggtactgagaccgagtctgatgcacttgtccgcccacagcgctcagcgcatggccaggcgcacaccaagaacccaataaacgttgctcaaagaatgaatccgtttctgcaacgactcctttcgagcctctccacgcctttctcgggatctatctttctgtgtctctttcccttgctgattttctgtccatttcccgcaccaccactaccaccaaaccctcctcccgccttcccccacccctagtctctgtcttctcgctgggtctcggtcgccctctctttgggcttctgttccgctttctggatcttccgtcccctttctctttggttctcttcccacttctccaagttcccacccctccctgggagttctgggactggcacctacctgaggaccccgaccgggggcagggcgactcccgaggcagtgcggacgccccagggcaccaccagcagcagcagcagcagcagcagcagccgaacccgagggctcctggacacctggcgggtctccatcacctgtggagaaccagaaaggggctcagtagggctgcatcccggcccagaaccccgggccccaccatgcatccacccccagcttcccgcacagtcccctaccgtgcagtgggctggggcagcgatggtggcagcccccttatatcgcctccgcagcccccgcaccgggcagtgacgcaggccggggggccggggacgcggggtcaccccctccccaggctcattaggagccgccagcggtaatgaggagccgggggtgggggacctgccgctgccttggccgccaccaactaattgggaccagaagctggacctgagacgagggagggggagagacagacagacagagaggtggacacagggggtgtgtcagagggctaaaaatagagactggcggaaggaccgtcagaggaacagagacacaaagagaaggacaaagacagagtggccgaggaagaaatagagagaaagaatgggaacgacagaaaaagaaaggaaaaggaagaaaacaagaaaagagagcgaaggagatggaaacgaacagtcagatggagatggaggagggaaagaaaaggctctcagaaagacagacggaaatggaaggacgtcctggtctggaaggagctgcccagagataaatacagcagcgagaggcccagaaagatcgagggtgaggtagggaggggggaaaggcaagaaatggcaaagggtacgtgtggcaggggtgtgaggacaggaaaagtgacagaccacatcagaaaaacctcagagagtgagaagaggggaaaacagacagggctcctgagctgccctaaggatgtgtctaagcccttatctgggaggagtttgggggtgctgtgaagattaaagcccagtcctcctcacactgactctttttgtgtgtgtgtgtttgtctgtttgagatggagtcttgctcttgttgcccaggctggagtgcaatggcactatctcggctcactgcaacctccacctcccaggttcaagccattgtcctgcctcagcctcccgagtagctgggattacaggtgcccaccatcacgcccagctaatttttgtatttttagtagagatagggtttcgccaaactgttggccaggctggtcttgaactcctgaccttgtgatctgccctccttggcctcccagagtgttgggattacaggcgtgagccagcacacccagtccacactgactcttaagaggggcctcagccgggtgctgtggctcatgcctgtaatcccagcactttggaaggccgtggtgggtggatcacttgaggtcaggagttcgagaccagactggccaacatggcgaaactccttctctacaaaaatacataaattaggtgtggtgtaatcccagctacttgggaggctgaggcaggaaaatcgcttgaacctgggagagggaggttgcagtgagctgagatcgcaccactgcactccagcctgggcaacagagtgagactctgtctcaaaaaaaaaaaaaaatttaaaaagaggggcctttatacacagtgaggagaagatgggcaaaacttggaagtcctacagagcagtagaaacttgggatgtgggaacttgggctcctagtttcctaggaaggtggtggcagaagcttggactcctgagtctaagagtggatgggacagggacccagattcctatgttctggggaaggaggaggctggggacttggattcctgaatctgaggaaggaaggagctagaggactggagttctgagtctggggggagggagctgggggatacaacttaggggacttgaaataggaaggtaccagggaactagacccctgggttttcaggtaggagagggtagagggccaggaccactggtttcaaaaaaataatttgggccacatctccactagatcaatccagtttctaactcccttccccaccccagagaaaatgtcctttacttctgtccctttaagagtctaagtctgtcgctaggctcccaggatcccctgggagggggtgaggtgcgtcacctgtgtgcccctgagaccctacctcccaccgccctgcccagatctgttctgcaacattcaccgttctctgcatccagctctgcttatctgctgttaccttggacaccagagcaggtaagagaccccaggacctcaagtaagcctgtcccatcgatgtgtcggccgcctccacctccacctgaacacagacctatgcttctctgcccagactggccccggagatgccgaaatcctagctccatcttcaataacagacttgagagtcctgccccaaagctctcttcttcaagtccctacccctctactctgcagagcccagaccccagaccctatttctggaggactcagagctcccaattcctttctaactcaggaaccaagagctcaaggcctcttatctcctttcacccctgcaatccagcccccaaaccttgctccctcaaaattctaggcacctgaacttccagccttctcctctctaaagaaccaggagccaggaacctcagccccctcaccctgcaagacgcaggagtctgaacccccagcaaccttcttaacccagagcccaaatgtctccctcctccctcaaatccatgagtccagccctcagccgttaggagcctcctgtagtgtaaacaactgttgagtcaaggtgtcccgggggacctcggagaggaaggagatcccacgtcccctcgaagccctgacactccctaaagtcgaagtcgaggagatctgaggcctggagaagtgtcgttctttcccaatttttctaggacccctcgctgaaacagataaggaaattaactacgactcccaagtagccccgcgcctcagtctctcttggctacctgggccatcgccccacaagcctccaagggacttgcgattgggttctcttcccatccctggcgccaagctgggccccggacagacgtggtccacctgtgttccagtgggcgtggcctccgggagtgggcggggctcctgggagccttcggccttaaccccttccttcccgctctcccccgcagctataggtatctgccagagctatgaaatcattcagccggatcctcttcctcgtcttcctcctcgccggcctgaggtccaaggccgctccctcagcccctctgcctttgggctgtggctttccggacatggcccacccctctgagacttcccctctgaagggtgcttctgaaaattccaaacgagatcgccttaacccagaatttcctgggactccttaccctgagccttccaagctacctcatacggtttccctggaaaccttcccacttgacttcactgagcccctcaaccctgacctccgagaaaccccgcacccagagtctcctgagacccccaaagctgactcactcacaacctcaatatcagaatccctggacatgcccaaaactaacctctccaaaatggcacacccagagtcttctgagacccccacacctggcccaactgaaatgccacacccaggatcccctgagacccccaaacctaacttctccaaaacttcacgcccagaatttcctgagaccccaaacactgaccttatgcaaactacaccccaagaatccccagagattctgcagcttaatgccactgaagtctcacaggcagaactccccgagacctcaaacactaaccctaccaagacccctgaccccaaatccccagaaaagcatgacctcaactccactgagaccccaaactctgaatttctccaagctctccatcctgacccttctaaaaccccccacccagaatcccatgtgacccacaatcccagccccaccgaaatttcccaaacagaattccccacaacctactaccaaaatgcaacagatgtacccaggacctccgaccctcaaatctccactagtctctacccagaaacacctgtgcccttcaaggatgacgccactgctctaaatgagctgtccctgaatcccaaaccaggaacacctgcagccatccagcccgactccccaaaattgcccacttcagattctccaggaatggttgagctgaaggccccccagaactctggccctaaggagtccaacgtccctcctccctcagcccggattgcaggtccccctgctcttccagggcgccccagtcagttggcccctgccactctgcgggcaccccagaggcacagccgaggtgagggagtcaacaccatcatcgtggtggagcgagtgaaggagaccggtgaggggcaggagccggactcctgagtctgagggaggggctgggggcctggactcctgggtccgagggaggaggggctgggggcctggactcctgggtgcgagggaggaggggctgggggcctggactcctgggtccgagggaggaggggctgggggcctggactcctgggtgcgagggaggaccggctggggtctggactcctgggtctgagggagaagggtttgggaacaggaattcctggatctgagggaggaggggctaggagcttggacccctgggtctgagagaggagggggttaggagcttagattgctggtatcccccttcaggcgtgactctggtggggcgaccacgtggcgcagcaggcggggccctctgcctgttcttcgcggggaccgcgctgctgatcggcatctttgtgctgctgtggtgtctttaccgccgggcagctagacagcggcccttcgcacatcaccggcttccggacgacggagatgaaccgggtgagcgccctgccccttgaatgcctgcacttttccataacctggtctctcccggcactacagggcgccagccaaaaaagcacaggtcccccacccaaggtcaatgaaagccctggctcttccatggcaacgtccagccccctaaatgtctgcaatttcacccaagagtccagtgccgctcccaatgcggttggaaacggcttcaggcccagagccggccgtccccgccagccccgcccctgcccctccaggtacgcggcccggagccctgtacttcccgccctccactgcaggccccgccgctgctgatcggacgccacgcctcctggtttctgcagcggcccccaccctttttattgaaaactcagttcaaatgcagaatcggaatcctctctccggcctcctgatcggtcggccgcacaaaagcggccctggagatgatctggaagggggcctggagggtcagcccagagatgaccacgcccctttgcacccacagttctgcatttggacgccccgaaagacccctacgacctctacttttatgctccggatacctgggtcccttcccacatcgccaccaagcagcccccgcccacacctcctctgccaccaaagctgcccccgccgccccgcgggggtcgcccgcagcgtctggaggccctgtcccccgccacgctccccaacaacttcgtgtgagccccaccgagttctgccggacctgcacatccccacagtgaaggaaaaccctgcgcttctggtatgcttagctagagtagtgccccggataaagggtctaatatacagagatgcttgcgctgtgatcagagaacaaggtctgagaccgaataaatatcatgttcccatggctagacccctcctctggcctgagccctggggtgggaggggctggagtctgagaccgctgaaacttggggaggagaggctggggtctggacccctgggtctgagggaggaggggctggggcctggactcctggtctgagggaggagggacgggggtctggactcctgggtctgagggaggaggggctggggcctggactcctgggtccgggagaggaggggctggggcctggactcctgggtccgggagaggaggggctgggggcctgaaaccctgggtctgagggaggaggggctggggcctggatccctggaactgaggaaggaggagctaggggcctgaactcctcggtctgagggaggacggggctggggaccaggatgcctgtgacctccacagccaagaacaactgagcctatacaccaaagcttttattgggagtggggcagggcaggatttacagtcacagagacagagacacaaagacacaaccctgcactgggaaaaaacacccctggctcctgccccattccctttcatgggattctgtgacttctctataggttccccaaattctaagctgaaagaggggtgtctgagaggggaaggatcccagattttgagtcattaagcccctgagggacacaacaaatggccactgagaaacagggtagttcgaaaccacccaggagaataaagtgcgaggaattggggagggggcatcatgaaaccaccatgggggagttcaatggtggtagcttcaaacctttgagttcatggactggagcagccactatttagacctgaaaaccatgtcagaaaaagtgcacgggggtagagaggcatattgttaaaattgcgattttggttgtttccccagacattatgctaagctagggagaagagggtcttgagaaatttggtgctttcgcagaatctgctggtaggggagatgtgaagtgggcacggaatcggggacttgaaaccgccattttccatcagaaacgctggtgagaatcaatccctggaatggcggggacgagtaattggttaaaccaatctggaagatgcagaacagagttgggagagatttgaaacttctagaggaggaccttgaatttttctgaaaggagatgggagctgagtgatctcaaaggttagcctgagagtccctggagataaaggaaagcggggggtgtgggtgcctcaaaaccacaagagagagtaagaggtcgaactgtccattcaaataaagccctgaaaggagagatttgaaaccactgaggcagaacgggtggagagggaacctttaggggaatttgggtatccttgaaactgtcagtctgcagcttcactacccctgagaggcaattgggaaggaaagaggatttgacagcactgggaacaagggagagtgcttcttaggcctgaggcaggacagagaggagcagggttccttgacactgtcactcaggccagagatgagtggaatggaggtcctggaaactgccattcagtgggaggcacatggtcagtagtcccggacagggggtgggggcctggggggctgaaatgtgctgtgtgtggccccataggagggcgggggtgcagggggtgcccccgggggctcagcctcatcctccatttcgctgtcgtcactgccagccagctggtcatggccaacgaagccacacttctcctcgctcatctcctcaggctctgcccacggctgcttctctccagaagcaaagaccccgtagaagatgacacctccatagtgcaccagggaggcaattaggaacacgtactgccactcctcccgagtctgcaggggacaatagggctgaggtcaaatgggaggacagagaaacagaggcggagagagggggaggcctagaggaagggaggcagagacccagggaggctgaaaaggcagggatggcaccccagagacagtgccaccacgtggtcagttaggtacgaagcacacacttggaggcagactgagtcaggactgcggcacccaccttgtgcttagtcatggcccccacgatgatggggcacaccatgcccgacagtgtgcccacgccgttggagatgcccatgaggatgctggcgtagcgcggggctatgtccaggtggttcacgttgaaccctggcggagagacaagtcggaaggcgtcacaccggaatctcactcgagtgattcccactgggacgttctcaaccctctcccctccccgccactcatgttccaccttttgtgaggctgagaggccccgttcctgagccaggaagttccctacagagctgaccagagtcccccaagctgcggatccgcggttctcaccagagatggcgaagccgctgaagcccacggctaggaccaggaaggagatggccacgcccttggagtgcgagtagccgaccaccaacagcagcgtggcttccatgccgaagcctacgggggcggggggggcccgcgtctcctgagtgtcggccggagcaaggcgcaggctgccccacaccgcccttccagacctgctccagccccaaaccgcgtctatccaccccagtctggccacctccacgcccaggcctcttcgcgccctccacgccacccgcacccaccctaaccaggcccctacttctccaagacccagccctgaccacgcccaccagctccatcgcccctcccgtagctccaccccttgactaggccactccccgaacacgcaggatccctgctgtgcacgctcacaccttcccctcaatccccactcatgagtttttggttttttttttttttaatttttgattttttattttttttaagagacaaagtctcacgacgttgcccaggctggtctcaaactcctgagctcaagtgatccaccggccttcgcctccgaaagtgctgggataacaggggttagccaccatgccctgcctgttttttaatttttaattgtaattttaatttttctagaaacaaagtctcgctctgtcgcccaggctggagtgctgcggcgcgatcatagctcactgcggcctcgcagttctgggctccagcgatcctcccttctcagcctcccaagtagatgggaccacaggcgcgcgccaccacgcctagcaaatctcacttgttagacagcaggccccctaggaccctgtctctccaggtgccttgctcttagcgcctcttcatcacctagttcatgtcctaccacacccaactttgtgcaggtcttgtccctccaggcccaactcggtcttctctctgctccacccgggaagtctcgcccaccctgcccttccgcgcggtggccccttggacggccgcgtgacagtccctttcatccaggcctgccctgccccggctccaccctgttggccacggccctttgcatagaaagggactcctggggcaggctggatggtttccgcctgtaaccactccccatcacctctcaatccggctctgctccacccaggctgtcctagagccggcccaggccccgccccactcacctccgcagttcatcaacttgcgcacgttggtggtggacatgatgcggcggctccgcaggaagtccgcgatctggccgccgatgggcacgatgatggtcatgaccaggtggggcagcgcggacaccaggcctacctgcgggaacaggtgtacagggacactagggttcggggccgccggctcggcgtctctgcccggtccgtgcaccaccggctcctccctgcctcgggatcgccgccagttccctcccgccgacccctccgcgcccccctgccctctcctcctgggctctaccttgctgatctcgaagccgaacacttcttcgaagtaggcgggctgggagatgagcagcaggtagaacgtccagctgcggcagaagttggccacgatgatggcatagactggcatagacgtgaagaagcgccgccagggagtgctaaacttctgtgggggcgaggggagggccgctaagacggggagcggggctgagggcttctccgcgtcccttcagggaccacagtgtagttctgcagaaaccaaaggatcccgaccgcactgaaacttctatggacccaaaggcgcgggctacaccatgttgccgtggggacccagggatcctagcctcaaggtgacacttgagtgatgaaggggtcctggccctatggtagcctctcaggtccgcaggtgtccgggcccctcagggacctgtctttttctttttttctttttatttttactttttgtattttgtattttgagtagagacgggggtttcgccatgttgcccaagctggtctggaactcctgggctcaagcgatcctgcagcctccacccccaaagtgttgggattgcaggcggaagccactgagcctgccctaggagtctctttttatcaaaaatgctcccaaaatacagcctcaactcaaggtctaagcaaaacccccacattctaatcccttctctgctggctttaactatgccctgtcagtggttctaatcctgctcaactcccgacctaaccctgcccccagcacctgagaatctcgtcctccgcgggttgcaacccgcctcctaggttctagcccctctctttgcgttccagtcccgtctcctctagagtctgcaggaaccgtccctgatctacacgctgtgcaggttcgtggcttgctatctctccccgccccttccccgaagatttggtcccggaccgtgagggggttcatgagtttcgcgctctctccgatggcgtcctcgatgtacttgcgctcctcctccgagatgctggggtgcagcgcgggggactcgtaggagacgagcagccagaacaggtaccagaagatcccgaagctgcctgggggggtcaggagggggatgggagcgaggtgaggaccggccccgctccgccccagcgccacccggaaccaggcatccgggtccctcaccgtagacgtagaaaacagagctccatcctgagtactgcacaaggaccccggcgaggggcatcgcgaccaccgccccagcataggaacctaagggggaggatgcgggggagagaacaggcccatcttccctcagatcaaggagtgcggacccccaccgcttccccctttccagacactgaattacaggccacagcccctcctcccttagacccaggaatccaggcctagcccctcctcgctcggacccaggaatccaggcccccagctcctcctcccccagacccaggagtccaggcccccagctcctcctccctcagacccaggagtccaggcccaacccctcctctctcagacacaggagtgcaggcccccagctcctcctctcagacccaggagtgcgggcctccagtccctcctccctcagacccaagagtccaggcccccagcccctcctctctcagacccaggagtccagccccagcccctcttccctcagacctgggagtccaggtccagagtctcctcctcctccctcagacacaggagttcagcccccccagcccctccccgctcagacccaacagtccaggccccaacccctcctccctcagattcaggagtgaggatccctcttcctctcaccacaaaaggctgtcgtcgccaggcgactccgttctaagggtggggcccatttgctccagatcccatggcaggcggggtatgtgaccccctaaagaggagaaaaccaaggtcactgagaagaggcagggtccgagcgagggcagggtcatatcaggcggggatttacctctaccaacccctgcaggatcctcacgaagatgacacagccatagtggacgcgggcagctgaggggatcagcatgtttagagtggatgttgccacaatagcaaagccgaaaactctgatgggaagggtcagagaaaagaatccaagctatccagccatgcccgggattctgcctttcccgcccacagcaagctaggcccagtggtccccgggaccccaggtcccaccacctctctgacttacaccttcctcaatcgcaagccccacctttctctaagacccacccccaaatccaggcttctcccatttaccagagccagcccgcaaattcaagaccacgccctctaactccacccacacaactgtagttaccgcccactttgagaccccaccactgtacctgttggctgcaaatttttgacagataaatcctcctggaatctgagtgacaatgtagccccagaaaaaggagccgtgtatgaggccgacagtctctggatcccagctgaactgggctttctgcgggccaaaatgtacattaaatcagccgccctgtccaggctctgccgctccaccaatcagcacccacagacttagcgtctcgacctatcagcaacgaggaacccctcccacctccaaaagcctgccaatcaaagctcacactatctttctgtcaattaaagtctacaaactccgctcttccacgttgctagggcctatgctgccttaacaacagagtccatcaccacctagacgccttgctttgcctgcttccttgcctccatgaaagcctaggggcccatgtatgatgatgactctctccacttatatccagcttatgagcgtttgcggagtgacctgcacagggtccaggcggggacacgaagcagccaagggggcggaccagattggaagggagcaaggggaggaacttcaggtaggacaaaggcacaaatcaggactcttttctgatgcaggggcaaggcctatgctgaaattaaaataggagaaaggacagggcacggtggctcacgcctgtactcccaggactgggaggccaaggcaggaggatcgcttgagcccaggagtccgagaccagcctgggcaacatagtgagaccttgtctctacaaagataaaaataaaaatgttagctgggtatgccggcgcacgcctgtagtcccagctgctcagaaggctgaggcaggagagtcacttgagcccaggagttcgaggctgcagtgatggtgccactgcactccagcttgggcgacagagcaatggccccactgcaccgtagcctgggagaccctgtgggtctttagataagggacacaacacatgcagtgggacgtaggcagtggcagggtttcaaaaaaggatcacattcagggaggaacctgagatgggactgagattaaatagatgtgacccggggacatgagcttggggtacaggcgtgagcaaaattgctagtaggtccaaaatggggcaggggcaacccctagggaacctgatgttggggcggactctacatttttcaatcaagcccctggaaataagggcgggacttcatttagatcaggacggggcttaggaaacggaggcggcccctaaggcgaggtcagaactaaggggcgcacggattgggcggagctattccgacagcgtttcggaaggggcgtggcctggacgtctggtgggtgagtgtgacgtcatgggggcgtaggcggagctcggtgagcggggcggggctctgcaagggctcaggccttgagctacctgcaccaccacgtggcccccgcggtgggtcgtgctgttattgaccatggagacgatggccacgcccaggttgcagcggatgccaaagctgatgcagaagcccagaccactcatgatggcgataatgtagcggcgagggaggccgaagcaggtgcagtccaccaccggcgggtcccgggtctgcgtggtcaccgggcgcccatccgcactcagctccagcgtctccgcgccttcctgccgcttctccagaaggctgcgggacagcaagagccagagactcggaagtccaggcccccagccccctcacccccaagaccaggatccagggcaaaacctgcttttcaacatccagaattctaagcccgcacctcctccttcaccaagagtccaggtccctggctcccttcgcccccctgatccagaaatcctccatctccctcagaccgggaattcaggcccccagccccctccttcttcacattgacggtcttcagtccccctctcccagctctgtcaaatccttcaactcaggagacttagaccccagacaaccctttgggattcaagagcctgtgcccccactccgaggcccaaagactctccagccgcctctcccggataagagtctattcgaggaagcaaaaggtgctaaggagatgcttcagcaaaggtgtcaaaagaacagatgcttctcagccacgtttgctagggggtggggagatgtccaggaccctgggaatccagcagcccgtcccaggcatccctagggaaccttgagtccaggctgccagcctagggggtagggagggggagtggcgggtggtgtcctggcaggggacagatggccctggtagggggattggctcattccccagcgtgactctcgcccccgcccgttctggatccagaatcaagtctgtgatgacgaagagggtatttggagggctgcctcaaacccagagagaggctgcagagagagagaggtgccttcagacaggtggagaaagacccaaaaagagggtgacagagatggggggagttgtacagaggcccagagagagggggtcacagacagaagaagggagagagatccagtgaaagggggacagagatctagagaggaagagacagagacccagagagagggagagagaataacaagggagcagagacccagagagagaaggggacagagacccagagatacagggggacagagacccagagacatagtgggacagagacccagaaagagggggacagagacccagagagaaagggagacagagacccagagagagaggaacagagacccagatagagagggggacagagacccagagagagggagagagaataacaggggagcagagacccagagagagagggggacagagacccagagatacagcgggacagagacccagagacatagcgggccagagacccagaaagagggggacagagacccagagagaaagggagacagagacccagagagagaggaacagagacccagatagagagggggacagagacccagagatggaggggtcagagacacagaggatgacagagacccagagagagggagacagagacccagagagagggggagagagacctagaaatagggggacagagacccagagagggaagagatggaaacctagagaaggaagcagacagagtcccaaagagaggcggggacagaaacccaggagatagaacatagatgcagagagatgagaacagagatccagaatgcaagagaaagatggagagcctgggagacggaggatagacaggctggggacgtgatttgtgaggtgcagcccctctctgaggtgggtaggcagccaggggatcgggctggatcccaggaaggggctggaacagatggaggcgagggagactgggacgggggaggaaggaacagccagacggtccagggggagggaggtggaagagctgtgagaacacagcaacccctccccatcctagaacttaaggaggtggggaggggcagttaagaaacaggggtgggagaagccagggagtggacagaacccagaaggagtaggaatgagaccccaagaggaagaagacagagagccagagataggggggattgaagccactaggacgaatagtacaggatggcagtaactccccccacccatcagaacccatcacccaaagagattagactgacccaggttgacatcggatgatatttgaccctgaaactcaagatgtgattgcagcccctgatgtgagattccttgttaatatgaggagatgtcagatctctaatcaaggctgtctaaacagggggtctcagtatcccacatctataaaatgggacaagggcaaaaatgcaagagaataaagagggaacttcaaggtgatatcaatcattttagagcaagaggaccaaggacacagagatgaaggtggccctgatgctttgcaggggacaaggacagagaagggagaccctagatgtaaatccccctcccctccctggataccccaaactcaggcctggggacttggcgatgaggaaaaacaacacttaggaggccattaccccaaattgagatgtctcaacttctctgtctctccctctctctctctctgcttctctcaggatctctgtccactcccccacgtctttgtctccttatgtccctctgctctctcttctcttcccattgtacaactaaggaaactgaggctcggggagctgaagtggcactccaaggtcacagacaagaacagcaatgggacctgatcccttactggccctcggcatccccctgcccaagacctggctctcagaaaggaggcaccttgggttctcatctctctggcatcccattcccccatgtccttgttccaagtcaccctgggtgcaaggaagctccccaccagctgtggcatcactcttctcaaggaagagctctgttctaggcttgggagggagactgacctgggttcaaatcatggggctcatactcatccactgatctccccaaccccagaatggagcctcagtttccccatctttgtctagaggattaaatgagatcaacctgttgtctctaatatggggtattcccctctccctccaaccatcagagcaaaccccaggcattggaagcaaatgcttttctctgcacaaactccctgctgatggtcctggccagagcccgggggtctctggggacccaagaggtaactcagagagtgagagccagagagattgactgtgagaaaccctagcacagatgagaaacagaggcagagactgagggaggggcctgaggaatacatccctcccgctgccaccccccagccccctccaccagcacgtctctttctctctctctcattctcctgacttcacactgatgtattttgagaaactcgtgaaaggaggcgagaaaaagggtggggaggggctggaaaattggaaaaagaaggggtgaggttatctcagcttcccctccaccaccaacctccgtcactgcaccatcctcctgcccacctccccccacttctgtccagccttattcttgtctctcatgttactagagggtggggtaactttggagctaagaggtgatctgcagcaagcaagactgatgttagacttagcaaaggacccccatggcctagcgaggtggactgaagctcagcgaaacacagggtcagggctgtgggccaaggggacagggcctgagggcacggcggcaggggcatggtgctgatgaggccatctccttcgtgcactgtggccagatatatttttaggcttttccgcagctgagtaatttatctgacttagagccaaagctggggttgggggtgagagcctgtggggaggtgtccagattatcctgagggacactcggttcactggggtcatcaacctggttgggagggagtccctgtcagccccagcctgtatcctttgggaaggctgtcctaccccaggagccgaaatttttggcctctaactcctttctctcccagggacccagggtgctgtgacttcttccacccagcctcaccccctcaaggacaacgggctatgagccccaatccgctttagctgcagattaaactccatgccagacagaaacggaaaaagacacagagagacggagagacccatggtgggagaattaaaacacagagacggggacagggacccagagaagtggggaccagagatccagggaagaggagagacccagaaagagggggacagagactctgagtcaggagttgatagagatccagtgagagcaatggccagagaaccagagagaggggcacagagacgcaaagaagcggaggcagagatctagggagaaggaggggcccagagagaagggagccgagatctggaaaaagagggagacggagacccagagagaaaaggggcagagacatccagaaagagacggggacagagacccagaagtggtgggggaggagccagagacccgggagagaggcatttacagcaccagagagagtggagccgggtggggtggggtgcagaaaaaggaacaggataatggacaaggctcgaccagggagaacagcgccgtcggagcccacggcagaaaactggacagatgggtggacccccatgccggggtatcgcccgttcatctgtcagtctgcgcccaggtgggaattagcatcctcctcagatcctcccactcttctcccgggacccccgccaggctcaccggtgcagcttcccgagagcacgacccgctagcttccgaaactcctcctggcggaactccatggtggcggctcctgccgccggtcaccccgcgggtcccccccgccgatccccccgcccgcgggcccgggcggccgcgtccgggttcccggggtccagccccggcccggccggccccgcagctccgctcggggggaaggaggctgcaagtgcaggcggcccgggggctgtcacaggactcagcgccgggggcggggcgcgggaggccccgccccggccccaccaggcccctcccctcgtctgtcagacccgccccctctcgcagccctttcatcctcgtcctgtcccctcctgagccttccaagaccacgcctgtgggttctgaactcacgcctccgagttcacgccccccaattctgttccttccccaggctactccccctatccctgttccatcacccctggctcctacccagattttctctcctctcctgagttctcatccccatcatttctctccccgacttctgttccccctaattgcgtcccttacaatcctgtcttctctgactttccctctgcgttcatcctccagttccttcactcctccccgcccccaccccgcaattccatccccatcccacctcgtccccagttccaatagtctcatccagggagttctttgttttctcattcaagggaaattctttcccctcaagtccaacgcctacttcgatccacctgtcgtccccctctagtccctttcgccacccgggttcttcacccttgagctccatctcctccttagtttccatctttcccctttgaatcccatactcctccagctctattctccctccggcgtctctctcctccctgttgcttctctccctgagtttcattccctaaccccgattttcttccctctggcttccgccccccacagttatatttcacacaccccgccagtgccagctgcgaccccatagtctccccattgtgttatttctctgctcctctgggatctgtccgcgctctgagttcttccctagctccgggggatccattcctctatttgagttctgtctccaccccctgagatctgtcccgccccctaaattgtgatccgcaccccctggcatcctcacccgccctctgaatttgtctcctcccctaggatctgtcgctgacctgagttctgcccccgccctctgagttctctccccaccgttggagttgtgtccccttctcctaggatctgtccctggctctgttcccgccctctcagttctgtccttgccccctggaatctgttcctgccatctgagttctaccccttccccacaggatctatctctgccccctggaatctgtccccacccaccgagttctggcctccgtccctgggatctgtccccgccctctgtgttctacccctgccccatgggatctgtccccgcccacccagttctccccgccccctggatctctccctaccctcccagtcttgccccggccccatgggatctgtccccgccctccgacttctgaccctcgccactgggatctgtcctcgacctcccagtcctgcctccgcccccggaatctgaccccgcccaccgagctctggcctccgcccctgagatctgtccccgccctcccagtcttgcccctgccccatgggatctgtcccccgcccaccgcctccgcctctgggatctgtccctgccctcccagtcctgctcccacccccggaatctgtccccgcccaccgaactctgtctccacgccggaattccagcgccgccccgttgggtagagcccggcccttccctgtcctgggcccgcagacagggtcccgccccgctcctgtcctcagaccagcccatctcccggcgctgagtccacctccagatccaggccccaggagggtgatcctttccccactacctccccgcgtcgggccgcaaatgcatttggtattaaattttcatgatgcggcccgcggtggggtgggaggagcagacggcgcgtcgggcgggcgccaaggacggggtggccgggaagccactgaccgccgcagcctctcgcttccagccttgactggctgtgtctctgggtctcacagctttgagaaacccctgggaccccagaacggaggacgctgcgggtctgaggcaggagggaggtaggaactgggactcgtggggctgaagtagcagcgcgggagccgctcacacgcgccacccagtggctgcagagtccccggcccgggtgcggaggcggtggttgcggcttggggccaggtgtgagggtggagcagatggtgaagaggagggagtgggaagcgggccccgccgctgccaaaacttgggcctttgccgaaaccatcgccatggaaaccgaggaaggaggaaaggactcagccgcacactttttcaggacctgggaatgagttactcggccccctccagcggctcaccgtcccaaccacaagtcccagcggcctctgagcctcagcgctcgtttgagaagggccgcgcactccgagggccgctgggagatgtagttctctgagacgatgggcagggaaaggttgcgccctctggtggacacggcgcccacgttcgctcatccgttccgcggccggaaagaccctacctgaagtcactcccaccctgacctcttccccgtcttttctccccctccctcacaattcaccccattgcagacacattgtgcttgcctgcctgccttttctttccttccttcctcttctttctcttcttttttctttccttccttcattccttctttctctgtcttccttcctttccccttcctccttcctttttctttttttctttccttccttcattccttctttctctgtcttccttcctttccccttcctccttcctttttctttctcttcttttttctttccttccttcattccttctttctctgtcttccttcctttccccttcctccttcctttttctttctcttctttttccttctttcttccttctttccttccttcctcctttccttcctcccttccttcctttttgagacagggtctcactctgtcgcccaggggcagctcactgcagtcttaacctccctgggctcccacctcagcctcccgagtagctgaggacaacaggtgtgcaccaccatgccccactaactcacattgtgctttgagcatttaccactgaagttcctccatctactgatgatcctaggattcactaaagaagaggagggtatagaccatcacttttttttttttttttttttttttgagatggagtttcgttcttgttgcccaggctggagtgcaatggcgccatctgggctcacagcaacctccgcctcctgggttcaagcaattctcctgcctcagcctccctagtagctgggattataggcgcttgccaccacgccaggctaattttgtatttttagtaagagacggggtttctccatgttggtcaggctggtctcaaactcccgaccttgggtgatccgcccgccttggcctcccaaagttctgggactacaggtgtgagccactgtgcccggcctcaacaatcacttattaactcaagaaatatttatcaaggcagggcgctcctgtaatcccagcactttgagaggctgaggagggctgatcacttgagctcaggagttcgagaccagcctgggcaacagatggagaccccgtctctataaaaaatatttaaaaattagctgggcatggtggcacctgtagtcacagctacttgggaggctgaggtgcaaccatcacttgaactcgggaggttgcagagtgagtcaggattgcaccactgcactccagcgtgggcctaagagccagactctgtcaaaaaaaaaaagaaagaaagaaagagagagagaaaggaaggaaggaaggaaggaaaagaaagaaagaataaagaaagaaacttctgcagatgtactgggaagaggatacaaagtagcaggaacagcagaaactaagagatgagggaaaatgggtgtggtcaggacactgttcagtatgactgggctccagttagaggaagaggtcaaaactaggctgggcacagtggctcacgcctgtaatcccagtatttggggaggccatggtgggaggatcacttgaggccaagaactcaagaccaacctgggcaacatagcaagacctcatctctaaaaaaatgcaaaaaataaaattagctgggcacaatggtgcatgcctgtcatcctagctactcagaggctgatgtgggaggatcactcgaacccaggagttccaggctgcagtgagctacatgattgcaccactgcactccagtgacagagtgagatcctttttttttttttttttttgagacggagtttcgctcttgtagcccagactggagtgcaatggcacgatctcggctcactgcaacctccgcctcagcctcccgagtagctgggattacaggtttgcgccaccatgcccagctaatttttgtatttttagtagagaccgggtttcaccatgtcggccaggctagtcttgaactcctgacctcaggtgatccacccagctcggcctcccaaagtgctgggattacaggtgtgaaccaccgtgcctgacaaccctgtctcttaaacataaaagtgagccatgacccggggctcagatcacacagagccttgagtgcttggctgaggggcttggaccttctcccagggcggctggggagccacaggagggctgtgaagaaggaaagtgcagggccagctctggggcctggggaggattaacaagggagactggaggccaggaggcttcagggaggatccagggggaaggatgaggcctgagctggggcagtgacctctataggactggaggggcacagcccaatgtccctcttccctcccaacacccacatatccccagtcagagacagaacaaaggcaaaaatcttttatttcaacttttagggaagccagcagcctcttctccacatctcagaagcacaaggagacaccctgatcaagaaggcaccggcagaagcggcatggccaccattaattgctgaggagacagagcaaagagaatgaggatccaggacccagaagtccagctcccagcccccctccctgggagacagagtccaggccccgccaatgtcccagcttccccaagcccctcccccaggcacctttctcttccggtggaaggctgccttgctctcatgagagttgatctgcagcgggatataagcgtctagatgatacagctgctgggggccccccatcaccaggcggttctccccgatctccagcgacagccccagggctccatcctggagaggtggcggaatcaggtcaccctccccagcaacaggatgatcacctggaccaggcatggtagcctcacacgctgggaaactatatttgaagggtctaatctcccaggaagagacagaagacagcaattacaagtctcaacgaccgagcacttacaatcccttgggcgccctcaggacagcaccagaaggtggcctgtgggcctcctggcagagaggacgcaactgacaagtccagcaacaaccccttgtcactcacactcagagacagtccctgacctttccagacctcattcccctgctctggtccagcgcgcaaaactcaccagtttggggaggtcaacttcggccaagaggaggtcgggggcttccagccacaggttcaggtgaggcttttcaggcctgaggaggaacaaggtccagggctgagcacagctgccaggtctttgcctggcgtgctgtcccttttctccctccaaccagccctattggcctcaggacgccttcccagtcaggagttctctctcctccctctctcagtgcccagggccccaggacatcacccagtgtgggaggatggagggagggattcccaagagcgttgaggaaacatcagaccggggatctaccgaaggcccaccctgactcagctctcccgggggcgggcgtgtacaggtcccccagctcctggatccgaggacgctgctccgagcggatgttctgctgcgagatggagcccatgaatggccggttcttcatcatgcgccattctgagggtcaggagcgccgtcaaacatcgtacaggtcagggttccctttgtgggggccaagagcctcccgggataggctccaccggctcaccaggactcttggggtctgaccacaccccgcaggcttggctccaggaagcccgcccaccttagtcacgcccctcccatgatatgccccaataaaacccacccctggagatgttcctggccccgccccctcagggcgtccagactccaccccctcctagtagcacagactccagggcaccctgcccaagccagcccctcctctcctaggggtgttccccaaaccgctcctggctccactctttcccgagggcccaggacctgcccctcacccggattcagctgcaagttgtatttgtcctcaaggccctccctggcgatggtgatcacgagctcccgcaagaaatcgctgttctggggtgacagagagggaaaagacaggcggtggcggggagggtaggggtagagacccctgcccaggcctcaaccgcagccccgcccccaacctgcatcctccggtagaagtcgctgttgacagctacgtcgtaggcggtacatccctggccttctgcggggagaaaaagggggtgaggaccccccagccctctgcaggaagcccacagcccagacccagacagggaagaaacattcagggacagcggccgtaagaagcagagagagacataaggaagtgagagctgggcactcactttccgctctggactctccgcccagcctcctccctggcctcttatctcctgtccatcagtgtgatgtcactagagttgaccctatcccttccctgctcacagctcttctctggctccccagtgctcccaagtgaaggtctgagccccacaagcctggcgttggagaccctatgtggtctgcccctcccacctctggagaagacctcattcttctagcaacctcggcccactgaatttctttcagtcactctccattactggctgatccaatccaatcattctctcccagctctgggccgctctacctagaaccttcttctgtctgcctgctgaactcctcctgttccttcaaatcttatcccacaccccctcctccaggaagccttccctgaccccttcatgtgggtgacgagccctctcaaggctgtgctgggtgcccccctccaaagcagcgtgaatcacaccctattgatactgcatccatctccttgagccccacccatgacagcgagtttctggaacgtggaatgtgcatttcataggtccttattccccggggcactgcctagagcttggtcccagaaagcttcaagagacatattgaaaaaaggatatagaggcagaaacagggacagaggtgaggcaagacagagatggagaaagggagaagggcagaggagaaaacaggatgaaagagagagccgcaggctgggtgcagtggctcacacctgtaatcccagcactttcggaggctgaggcggtggatcacctgaggtcaggagtctgagaccagccaggccaacgtggcgaaaccccgtctctattaaaaatacaaaaattagctgggtgtggtggagcacacctgtaatcccagctgcttgggagcctgagacaggagaatcgtctgaacctgggcaacaagagcgaaactccatcacaagaaaaaaaaaaagaaagaaagaaaaaagaaggagacagcaggctcaggactaaagccaggagatccgctaatgcacgaagagcactctgcccaggcctcccggccctggagtggggcatggaaaagtgccagcctggccaggtggcagaaccaggactgcccgggtgtgggatgtccagggcactagagatctaccatagggaaaagaatcagatcgaggggccagatctccaggagctgagggaggagggtcctgggcccaggattcttgggttctagggaagaaggggcctagcgggccagactcctgggtcctctgagggcactgacttgcatccagttctgcatgaggctctcccagactcatggggatgcgaaacccagcttggtcctcctctagcatctgaagcagctcctcctcggtcacgtcggcgggaggagggatagagggggagtggcagatgttgatgaaaaccttcccttccgaggagttggtctttatgcagaaacctggtgggagtgggttagtcatgacaatccttttctgcacaagtcccagtccccatccattgtctccaggctctgtctcttttccttttgccctgtcccccttttttgttccactccccacccgagatccctcacttctcttttttttttttttttttgagacagactctcactctgtcacccaggctggagtgcagtggcgtgatctcggctcactgcaacctccacctcccaggttcaagcaattctcatgcctcagcctcccaagtagctgggattataggcgcccaccaccacgcccggctaattttcgtatttttagtagagatggagtttcaccatgttggccaggctgatctcaaactcctgccctcaggtgatcctcccgccttggcctcccaaagtgctgggctcccggccccctctcttctttgttttctccttgtttgttttttgagacagggtctcactgtgtcacccaggttggagtgcagtggtacgatcttggctcaccgcagtctcttccacctggctcaagtgagcctcccacctcagcctcgtgagtagctatgactacaggcacgcacccaccaagtccagctaattttgtttatttttagtagagatgaggtctcactatgttgcacaggctggtcttgaatgcctggcctcaagcaatccttccacctcggcctcccaaagtgatggaattacagatgtgagccactgtgcccagcctctcttcctatctttgttgttgttgtttgtttcgttttgtttttgagacagagtctcgctctgtcacccaggctgcagtacagtggtgcgatctccacccactgcaacttctgcctcttgggttccagcaattctcctgtctcagcctccccagtagctgggactacaggcacgtgccaccgcacctggcctcttcctatctctgattctctggccccctacctactcctactctgtcctccaactcctttctgtcctaggatgatctctgtgggtgtctgctcaccccacccccaccctaggcctttattttcgtgtctctttccttcctcctctctctgtcctctccctgggtctcctgtccctctctctccggtgtcctttctcaccaggctgaggctggatttgtgtcgattctggtctggttgtctgggcttgctggagctccttcgaggcctgtataaaggaaaactacctccaggctcggagtctgtgccatcagacccctcatttgttcctcaaatggagcaattcttatgcatgagagctgtggataacgcgagaaattagacggtttaggtcccctttctcctttgagaactagaagaacaaccccaaccccattcccatttctttttttttttttttttttttggagacggagtctcactctgtcgcccaggctggagtgcagtgccgaggtctcggctcattgcaagcttcgcctcccgggttcacgccattctcctgcctc[175 bp omitted]cccggccccccactcccatttcttagcaaacttgaagcccattaacctcaattccccgaggcctggttcccgccttagtgcattctgggaactgcagtcccatctttgagcaccccgccaaaatccccgaatactcaaggatccaggggtccggtcactgcacctgcagcagcagctcctcaaatcgcgccgaatcagcaccgatcgcctccgcctcgcttagccccattcccagcagcttcgggttcgccatggccctgggaaagagatctaggcgtcctcgagaccctcaacgtgggaaactttgcccaggatccgaaccccagtgcctgctctggccctcaatcgactccggatacctactatcctgttcaaaaacctaagactggcctaagactacatttccattcaagaccgaacaccatcgtcaaatccgtggggaatatgtgtctctagacgcactaccctccgtcctacgtgccgaactgtaaacgaagccacacttccggtctatcggtaaacacaggactggagtatgccacacttccgagtaccccagtgttcattcacaagctggtatcgcgttatcgacaagccacgcccctcgcatcaatcaaaaataaaccccaaggcggatccctgagtgccacacttcctgtatctatgaaagccacacttccggctgggcgctgtggctcctaccggtagtcccagcactttggaaggccagggcaagaggatcgcttgaggccaggagttcgaaaccagcttgggcaatacaatgagataacgtcccacaccccatctcttaaaaaaaaaaaaaaagcgccagacttccactctttccacaaccaaaactggcccccttactttgcagtgaaggttgcattttccaaaccttaatctcaatgtccatcctaaaaggtaccctttttatctttgaattatcacttcctgccagctctagatcctaatacgtccagatctagacccgccaggtctagatctagatctagacctctagtcaatataattagaaaagctgcactttgaggctgggaggccgaggtaggaggatcgcttgagcccaggagttcgagaccagcctgagcaacatagcaagatcctgtctctaccaaaaaaaaaaaaaaaaaaaaaattagccaggcttgatggcacctgcctgtagtcccagctactgtgcaggctgacgcaggagtaatgtttaaacctgaaaagtcgaggcgacagtaagccgtgatcggaccactgcactccagccctgggcgacagagggagaccctgtctcaagaaaataaaaggtaaaacaaaacctgcacttcctgctactataaaacaaggcactgggaagacgcatcaataggacgaccctttttttttattactattttttttttagacacagtctccctttgccacccaggctggagtgcagtggcgcgatctcggctcactgaaacgtacaccttctgggttcaagtgattctcccgcctcagcc[131 bp omitted]cggcctcccgaagtgctgggattacagccaagagccatcgtgcccggccacgccgatcctcataaatccggagccctcctaactattcgcaaagtacccacatcgccgtctccccttcctccccgttttaagcagtgcgcatgctcctaaatacgcttccccgtgggggacgtaggcggggccatcgggtcctaaggaaaaagtgtgggcgtggctgctctctgtatcttgtagccccaccccattcccattagccccgcccctttgggctggaaccggaggtgtcgctcttcggacctcaaggttccccttaacacagagcgccccgcagtcttcgcggaaagcgttcggggtaggcgatggctgcgacgcgtgcagggccccgcgcccgcgagatcttcacctcgctggagtacggaccggtgccggagagccacgcatgcgcactggtgagagtctgcccggccggcgctgctcgctgcgttccccaggcctgggcgcccggtttttcgcggggagtcccgtcatccactgcggtagctcagccgctccgcctctcttagtccccgtgattcccgccgcccaataggatcgcgccctgtaggacgctcccttgagccttggcggtggcagccttttagtctgttccggtcttccccactggttctcttgccccttgatcctgaactcctcgtagtgtttccgcggttttcctgaactcctctagacgctctcgtgattcctcagggtcccctcagaacctgacgccacccaccagaccccttaggattcctgtgaggctccagtgacccacaacccccattgtctttccacgactcttcaaaacatcctatggcttccatgggcctccagagcaccccagacctcctgagggactcccttcatccctttgattacccagagaccttcagaacttccatggagcccccgtgatcccataggacccctcaatactcgtggggttcatgtgacctcatcggaactctcaggagcctagaatacatcaggacttccggtttgggttgggttttttttttgtttttttttttgagccagggtctcactctgtcgcccaaactgaagtgcactggcgctatcacaccactgcagcctcaacctcctgggctcaagccatcctctcacctcagccccccaagtaactgggaccagagacgcgcgccaccactctcagctaatatttgtactttttctagagacaaggtttcagcatgttggccaggctggtctcgaactcctggcctcaagtgatccacccacctcgacttcccaaagtgctgggattacaggcgtgagctactgcacccagccacatcaggacttcctgtaattacttatggcccctcacaataccctcacggggctcctatgatctctctagctctcagaatgtcccatagggttcccatgattgttcaggaacccctgaagtcctcgtgagggtcccatgatcccctgggggtcctcagaacctccctaggactcccatgacccctcagaggcccccagaaccctcgtggggttcctgcaaatgagtagggcacctcaaactttctgtcgtttccccaggcactctcagaattccttcacggggctctcatgatcccccagggtcccccagcacccaggcgaaaggagcttaggcttctttgagggggagggcaggaggccagagcaatgatccaagtggaaggaactggatcagaaccctggcacagcctagaacttggggaggccaagacgggcagatcgcctgagctcaggaattcgagaccagcctgggcaacatagtgaaacctcgtctctactaaaatacaaaacattgggccaggcgtggtggctcagacttgtaatcccagcactttgggagtcctaggtgggcggatcacctgaggtcaggagttcgagaccagcctggccaacatggtgaaaccccatctctactaaaatacaaaaattacctgagcgtggtggtgtttgcctgtaatcctagctacttgggaggctgaggtgggagaattgcttgaatccaggaggcagaggttgcagtaagctgagattgcaccactgcactccagcctgggcaacggagcaagacgctgtctccaaaaaaaatacaaaaatggctgggcgcagtggttcacacctgtaatcccagcgctttgggaggccgaggcgggcggatcatgaggtcaggagatcgagaccagcctggccaagatggtgaaacccatctctactaaaaatacaaaaaattagctgggcgtggtggcaggcacctgtaatcccagctacttgggaggctggggcaggagaatcgcttgaacccaggaggtggagattgcagtgagccgagaccacgccactgcactccagcctgggcaacaagagcaaaactccatctcaaaaaaaaaaaaaaaaaaaaaaggaaacagaaaacaaaagattagccgaggatggcagcacacacctgtagtcccagctacccgggaggctgaggtgggaggatcacctgagcctgggaggtgcagtgatcataccactgaactccagcctgggtgacagaataagaccctgtcccccctgaaaaaaaaagaagttgaggccaggcaagtggctcacacctgtaatcccagcagtttgggagaccgaggcaggaggatcactcgcacctaggagtttgagaccagcctgggcaacatggtgaggccctatctctattaatataaaaataaaacataaaaagtgaagttgagacttggacttgagtccttgcatttcagacccgtggtcttgcctacaccagcaaagttctcaaccgtacagtctctgggccagactcaaccaacaaacatgttttctttggcgtgaactttattttttttttatgtgaaatgctggacaattgattccatgtaaacatccgggaggtcctcttgaaaataaaattccaaaatgtgtcaacatttggctcaacttccctgacaaaagtcatctgggaccaatagctcctgtcttttccatgaatcgttaagctcctcttctcatccaggccctcttctcaggcctcctggaaccctctggacattcttttggaattttgtttttcttttggggggaagctttccaacttgcacagaataattagcatttattttgaactcctgtttacccatcactgtgcctcaaccatcatcaacatttatcccagcgctgtttccttctgtattttctttggagtaatttaaacaaatcctggatgtcacagtattttcctataaatatttgaatcctttcttctaacagataagggctcattttgttacaaaactaccatggtctgttaccacacttaacattaagtcattctttttgttttttgtttgtttgtttgagacaggatcttactctgtcgcccaggctagcattcagtagcgttcatagctcactgcagcctgaaactcctggacccaagcaatcctcccaccccagcctcctgactagctgagactacaagtgtgcatcatcatgactggcaaattttttacttttatttttgtagagatggggtcttgctgtgtaggtccagactagtctcaaactcctcagctcaagcaatcctcccgtctcagcgtgggaaagtgcagggattacagatgtgagctaccatgcccggccaacaatcattctttaatgtcatctgatgcccagttcatgttcaaatatccctgactttctcacagatgtctctctccctgtgggcgtttgagtttggaacttctaagta[131 bp omitted]aaaacccatctctactagaaatatataaattagctgggcatggtggcggccgcctgtaatcccagctacttgggaggctgaggtaggagaatcacgtgaacccaggaggcggaggttgcagtgagctgagatcgcaccattgcactccagcctgggagacaagagcaagactccatctcaaaaaaaaaaaagaaagaagggccagtaagagaaaaatcaggaatatgtgacatcagagatgctaggggagtctgtagaaggagcaagtgagcagtgtgctttggatttagcatcagggaagacgtgaccaggatgagaaagaaatatggaggagaagtccgggcgcagtggctcacgcctgtaatctcagcactttgggaggccgaggcgggcggatcacgaggtcaggagatcaagaccatcctggctaacacagtgaaaccccatctctactaaaaatacaaaaaaattagccaggcgtggtggcaggcgcatgtagtcccagctactcgggagcctgaggcaggagaatggcgtgaatccaggaggcggaccttgcagtgagcagagatcgcgccactgcactccagcctgggtgacagagcaagactctgtctcaaacaaaaaaaaaaaaaagaaagaaagaaatatggaggagatgtggtgagtgagatgtggtaaaaaaattttttttctttgagacagagccttgctctgttactcaggctggagtgcagtggcgtgatcttggcttactacagcctctacctcctgggctcaagtgatcctcccacctcagactcccaggtagctgggactacaggcactcaccaccacacccggctaactttttgtattttttgtagagatgagctttcaccatgttgcccaggctggtcttgaatgcctaggctcagaccacctcggcctcccaaagtggactccaaataggtgccactgttgtggcaccagcccaaggactcagttgagaccctaattgaatgaattaaagatgttgacacatccataatcccagcactttgggaggcca[134 bp omitted]agattgaggcgggagaatagcgtgaacccaggaggcggagcttgcagtgagctgagatcatgccactgcactccagcctgggtgacagagcaagactcagtctcaaaaaaaaaaaatgaaaaaatgttctagaactagagtggtgatggttacacaacactgtaaatgcacagaatgccactaaactgctgaactatacactttgaaatgctctattttaccacaaactttttttttaaagcaataggaggaaaagaattagctgatggggcagagggagacagacgtcccctcctagaggattctgggtaggggttgaactgccccagctcctcccgaacccctttccaaactgtctctacctcccccaggcctggctggacacccaggaccggtgcttgggccactatgtgaatgggaagtggttaaagcctgaacacagaaattcagtgccttgccaggatcccatcacaggtacgagatgtcccccagtcattagtggaagggaggtatctgtgccctctagccctacccaccaacacccattccccttgcctagggccctgagggcaggaaacagctggtggtgggagatgggctgcgatgtctggttccttctgaaaccagtcaccctaattatggttccgggtctctgtggaggctttgtgagactgctgtctgttaaaatagcttccttgccctggaggtgatcatagccgtgacccagcagagaatggggaccagctttacactcttgggctgatccaggctccgaaaatctcagccccctccagatatgacatgggctactcctcccatctgagtccccccacttttctccccaggagagaacttggccagttgcctgcaggcacaggccgaggatgtggctgcagccgtggaggcagccaggatggcatttaagggctggagtgcgcaccccggcgtcgtccgggcccagcacctgaccaggtgatgcagctgaggtgtggaccccgggaggcggggaaccccagcatccactcgagaccatgggaacaaaggctatttcccaagatcccactgaattaatttgcagctaaggctcagattcccagtatgtgctggaggcagtcgtggctgaaacatgcatccgttgtccactattcactgggactagaagccacaaagcctctatttcccaggacattcttggagtgcattggggctcagttcactggggctggtgaagcccctaaatccatttcctagccgcttgcggggaagctagagacaaaaattccatttcccaaaacgcaattgaggttagaagctaagactcaatttcccaaaagcttcagggatttccggcggccaagacctttacacagcatcctcagggtttgtgtttccatgactataattctcataaatcttcactgccctctgccccaggtaaatggtggggatgcctcaggggctcatggggattgtagtccaggtatataggagcagcccaggactctgcaaggctgagggccgttggaaaatgagcaccctcttgctttctcgacaggctggccgaggtgatccagaagcaccagcggctgctgtggaccctggaatccctggtgactgggcgggctgttcgagaggttcgagacggggacgtccagctggcccagcagctgctccactaccatgcaatccaggcatccacccaggaggaggcactggcaggctgggagcccatgggtgagaccctggagtccctagccctatcctcccacatgactcagcagtgctagctccagtcccctcattctttttcttttagacagagtttcgctcttgtcgcccaggccggagtgcagtggcgcaatcttggctcactataacctccgcctcccgggttcaagtgattctcctgcctcagcctcctgagtagctggaattacaggcacccaccaccacacctggctaattgttatatttttattagagaagaggggtctcatcatgttggtcaggctggtctcaaactcctaacctcagatgattcacctgccttggcatcccaaagtgctgggattacaggcatgagccaccgtgcccggtcccctcattctttttcttttgtttttgtttttgtttttttctttttcagacagggtctttctctgtcaccctggctggagtacagtggtgcaattatagctcactgatacctcgacctcctgggctcaaaatcctcccacctcagcctcccaagtaactgggactacgaccatgcaccaccacacctgactagtttttgtttttgttttttttttttttgagatggagtttcgctctttgttgcccaggctggagtgcagtggtgcgatctcggctcactggaacctccgcctcccgtgttcaagtgattctcctgcctcagcctcccgagtagctgggactacaggcatgcaccaccacgcctggctaattttgtgtttttagtggagatggggtttttccatgttggtcaggctggtctcgaacttcccacctcaggtgatccgcccacctcgacctcccaaagtgctgagattacaggcgtgagccaccacacccggccatttttttttttttttcctaatgtagccatggggtcttgccatgtggcccaggctggacttaaacacctagcctcaagggatcctcttgcctcatttttttcttgcaggagtaattggcctcatcctgccacccacattctccttccttgagatgatgtggaggatttgccctgccctggctgtgggtaaatgatggcctggggggtcctgactcttgggtctgagaaaggaggggatcgtggggcccaaactccagagtctgagagacaagggggctggaggcctggactctgtggaaggagtctgtgggaggaggggctgcgggtctgaactcctaggtctgagggaggaggagctggagtctggactcctgagtctgagggaggaggagctggagtctggactcctgagtctgagggaggaggggctggagtctggactcctgggtctgagggaggaggggctggggtctggattcctgggtctgagggaggaggggctggggtctggactcctgggtgtgagggaggaggggctggggtctggactcctgggtctgagggaggaggggctgggacctggactcctgggtctgagggaggaggggctgggacctggactcctgggtctgagggaggaggggctggagtctggactcctgggtctgagggaggaggggctggagtctggactcctgggtctgagggaggaggggctgggcctggactccggggtctgagggaggaggggctgggggcctggactcctgagtctgagggaggaggggctggagtctggactcctgggtctgagggaggaggggctgggggtccagattcctgggtctgagggaggaggggctgggcctggactcctgggcctttgagctgccccacttccccaggctgcaccgtggtggccctcgtgcccccggcctccccggcgcccctcctcctggcccagctggcgggggagctgggccccttcccgggaatcctgaatgtcctcagtggccctgcgtccctggtgcccatcctggcctcccagcctggaatccggaaggtggccttctgcggagccccggaggtaccttcgggacaggggtcgtggcggaacgcggctgggggccgcaaggctcctcctgcggctgaactggggggggtccctaggaagggcgtgcccttcgacggagcctggcgggagagtgtgcggagctgggcctggcgctggggacggagtcgctgctgctgctgacggacacggcggacgtagactcggccgtggagggtgtcgtggacgccgcctggtccgaccgcggcccggtgagacccgtgcgctcccgtctcctcataccctggaggccgttggtgtctgtctccagtcttcggggtcccgagtctctgttcattttattttattttattttatttattttgagacggagtttcactcttgtcgcccaggctggggtgcagcggcgcgattttggctcaccgcaacctctgcctcccaggttcagcctgggagtagctgcctcagcctcccgagtagctgggattacaggcgggcaccaccatgcctggctaatttatgtatttttagtagagacggggtttcaccatgttggccaggctggtctcgaactcctgacctcaggtgatccgcccacctcggcctcccaaagtgctgggactgcaggtgtgagccaccgcatccggcctctctgttctttaggactctgttgatttatctgagtgtccatgtccctagttttccagcctctgtcttcactcttcagatcaccaacttgctagagtgcaatggtgtgatctcctgatgccccttttcctcacagggtggcctcaggctcctcatccaggagtctgtgtgggatgaagccatgagacggctgcaggagcggatggggcggcttcggagtggccgagggctggatggggccgtggacatgggggcccggggggctgccgcatgtgacctggtccagcgctttgtgcgtgaggcccagagccagggtgcacaggtgaggcagggggtagagacttgagggtgtcaggggaggaggggcctggagacccagctcctgggtccaagggaggagggagctgggcgtggacaactgggtccgaggaaggaggggctgggagcctggactcctgggtctgaaggaggaggggctgggcctggactcctgggtctgagggaggaggtgctggggcctggattcctgggtctgagggaggaggggctggggcctggactcctgggtctgagggaggaggggctgggcctggactcctgggtctgagggaggaggtgctggggcccggattcctgggtctgagggaggaggggctggggcccggattcctgggtctgagggaggaggggctgggggtccagactcctgggtctgagggaggaggggctggcggcctggactcctgggtctgagggaggagaggctgggggtccagactcctgggtctgagggaggaggggctgggggcctggactcctgggtctgagggaggaggggctgggcctggactcctgggtctgagggaggaggtgctggggcctggattcctgggtctgagggaggaggggctggggcctggactcctgggtctgagggaggaggggctgggggtccagattcctgggtctgagggaggaggggctgggggcctggactcctgggtctgagggaggagaggctgggggtccagactcctgggtctgagggaggaggggctgggggcctggactcctgggtctgagggaggaggggctgggcctggactcctgggtctgagggaggaggtgctggggcctggattcctgggtctgagggaggaggggctggggcctggactcctgggtctgagggaggaggggctgggggtccagactcctgggtctgagggaggaggggctgggggcctggactcctgggtctgagggaggagaggctgggggtccagactcctgggtctgagggaggaggggctgggggcctggactcctgggtctgagggaggaggggctggggtcctgcagtcctcggtctcagcaggaagggaccagaagtcgacttctagatcatttctctccctaggtgttccaggctggtgatgtgccttcggaacgcccattctatcccccaaccttggtctccaacctgcccccagcctccccatgtgcccaggtggaggtgagacccttaaggctgcagagctcctacccaccgccagccaagggcagcagctctgtgcctggggaagcccttggggtaaccatgtgacctgggcgtgggggctgctgcctgctctaggctccttccctggtgggtgggccctggagggctgagcctcccggtcaccccttgcaggtgccgtggcctgtggtcgtggcctcccccttccgcacagccaaggaggcactgttggtggccaacgggacgccccgcgggggcagcgccagtgtgtggagcgagaggctggggcaggcgctggagctgggctatgggtcagtctgcgtggcccgggcgctcactcctctcctcattcttccatcttcatctcccttctccctgggtcgctccccgcgcctttaactcacccctctcccggcctgccaccgtctgttttcctctgttggacaccttcatcttccccacaggctccaggtgggcactgtctggatcaacgcccacggcctcagagacccttcggtgcccacaggcggctgcaaggagagtgggtgttcctggcacgggggcccagacgtgagtacatcccctccccgtcaccagcccccccgccgccccatgcccttgacactcgcatccggcctcgcgtgccccttgcatcctcttgacaccgtccctctcacaggggctgtatgagtatctgcggccctcagggacccctgcccggctgtcctgcctctccaagaacctgaactatgacacctttggcctcgctgttccctcaaccctgccggctgggcctgaaatagggcccaggtgagtcgttgggggccagtggtctgggagtgtgaacggggagaggggaattgatgcctgtttccccgtggactggagggctggcgcgaggtccatccaaaccatctcttagtcctgctgagtaccacgttgtggcctcacactttccctaccccaggcctgccgagactctcagctctgccccatgaatgtctgtactctcccagaaactcatgggtctaggagcttggggtcccccagaggttcactggagcagaagcttggggtccctcagaggctcatgggagcaggagcttggggtcccccagaggctcatgggagcagaaacttggggtcctccagaggctcatgggagcaggagtttgaggtccccccagagactcaagggagcagtttagggtctaccagaggctcatgggagcaggagcttagggtcccccagaggctcatggagcaggaacttagggtcctccagaggctcatgggagcagaagctttgggtcctccggggctcatgggaacaggaatttggggtgccccacaggcttatgagagcagtttagggtctgccagaggctcatgggagtaggagtttagggtcccccagaggctcatgggagcaggagtttagggtacccagaggctagtgggaacaggggtttggggtcccccagaggctcatgggagcagaaacttgagtcatccagaggctcatgggagcaggaatttggggttccccagaggctcatgggagcagtttaaggtcccccagaggctcatgggagctggagtttagggtcccccagtgaatcatgggagcaggagttttagggtcccccagaggctcatgggaacaggggtttggggtgccccagaggctcacgggagccaaggcagtcttcccagtgcggtagagcatagggtctgagcagattgaggccccaggactcctcctcatgtcccaccctactccagcccagcacccccctatgggctcttcgttgggggccgtttccaggctcctggggcccgaagctccaggcccatccgggattcgtctggcaacctccatggctacgtggctgagggtggagccaaggacatccgaggtgctgtggaggccgctcaccaggctttccctgggtaaggggtcacacgggaaagcccaagggtcatggtgtggcagagaggggagcctgcccacagcaattggtggactgggaggctgggcccccagggtaggggctgtggacagaggtggggtgtcaggagagccaagaccaggatgccaacccccactgtgcgctgtctgcccacagctgggcgggccagtccccaggagcccgggcagccctgctgtgggccctggcggctgcactggagcgccggaagtctaccctggcctcgaggctggagaggcagggagcggagctcaaggctgcggaggcggaggtggagctgagcgcaagacgacttcgggcgtggggggcccgggtgcaggcccaaggccacaccctgcaggtgaagggtctgtgggcacctgggccagctgggcaggcggggtggggctcagaccagaggctgtgagataacccaggcttggaattcgggcccagccccaccgccttccacggcaggatcatcagcaagtggcttcacctctccctacctcagttccctcatctgtacagtgagtgggcacacaacccgcctcgtagagtagcgttcgccagatgatggatagcgacccattcctggaccctaaaatcaatttagtgggctgttaggcggttctcacattgctgtaaagaaacacctgggggcgcagtggctcacgcctgtaatcccagtacttcgcgaggctgaggcaggcggatcacgaggtcaggagatcgagaccagcctgggcaacacggtgaaacctggtctctactaaaaatacaaaaaattagctgggtacggtggtgggcacctatagtcccagctacttaggaggctgaggcaggaaaattgcttgaacccaggaggcagtggttgcagtgagccgagatcgtgccactgcactccagcctgagtgacagagtgagaccttgtgtcacaaaaaaaaacaaaaaacaaaaaatacctggccagacatggtggctcacgcctgtaatcctagcactttgggaggcaaaagtgggtggatcgcttgaggccaggagtttgaaaccagcctgggcaacacagtgaaaccctgtctccacaaaaaatagataaattagctgggcatgttggcaccagtctccctctggcacccggctggagtgcagtgccacaatcatggctcactgcagcctcaacctccgaggtccaagtgagccccccacctcagcctcctgagtatctgggatcacaggcacacaccagcacacatgactgggtgtttttgtatttttgcagagacaagagactcgccatgttgcccaggctgatcttgaactcctagcttcaagtgatccgcctgtcttgacctcccaaagtgctgggattataggcgtgagccactgcgcctggccagggattacatttcaacatgagattt[161 bp omitted]ccccagccttccgagtggctgggactacaggtgcccaccaccacacc[132 bp omitted]cccggccttcttttttttaaattttattttactttagttctgggatacatgtgcagaacgcgcaggcttgttacatagggatacacgtgccatggtggtttgctgcacctattgacctgccctctaagttccctccccttgcctcccaccccccaacaccatatttatttttaacaaaagaaaatagaccaggcgcagtggctcacgcctgtaatctcagcactttgcgaggccaaggtgggcagatcacaaggtcaagagatcgagaccatcctggctaacacagtgaaaccccgtctctactaaatatacaaaaaaaaaaaattagccgggcatggtggcaggtgcctgtagtctcagctactcaggagactgaggcaggagaatggcgtgaacccgggaggcggaggttgcagtgagccaagatcgcaccactgcactctagccagggcgacagagtgagagtccgtctcaaaaaaaaaaaaaaagaaaggcggttatgcaggatgtttctcaccgcccgaacccccgtggaatgattcactttgaccagcgtctgcgaaatggcaggggcttccacaatggtgcggtttgggccaacaccaagtgttggggagaatgtagaggaactggatctctcatttactgcgggcggggctcccctgccccacacgtgacccacctgtccctgcaggtagccgggctgagaggccctgtgctgcgcctgcgggagccgctgggtgtgctggctgtggtgtgtccggacgagtggcccctgcttgccttcgtgtccctgctggctcccgccctggcctacggcaacactgtggtcatggtgcccagtgcggcctgtcctctgctggccctggaggtctgccaggtatagccccctgccttcctgcctctcctccccgtagcctcagggcagcagaaaaaggcgccccaaagtcggcaggagcttgtctcttaccccaccctccgtggtacccatgctgcccccagccccagcacccaaaccttcactccttggggacccagtgcccattcttcaccctaggcctggggctttctcctccatgaccccccatccccttccctcccatgggcaccccctgaatgcccactccttgccctgcccccacggcctccccaacctttcactctctctatcccctaggacatggccaccgtgttcccagcaggcctggccaacgtggtgacaggagaccgggaccatctgacccgctgcctggccttgcaccaagacgtccaggccatgtggtatttcggatcagcccaggtgctctttgttctgttttgccatcttcagcatctcaaacttcaaacaggctcctccttttctggaaacacagccccgccctcttagaactcctgttggtaaggggagaaactccttgacaagaaggttttgaggccccgcccttaggactcaagttactaaggaagaggctgtccttagcaacaggggcctgagagctgcctagcccaaagacctcgtctcaggggacagcccgttgctaaggaccacaccctagatttggaggcccacagtctacgctttgtttttctattttgagacagaacctcaccctgtcacccagatgcaatcatacctcactgcagccgcaacctcccaggctcaagccaccgtcccacctcagcttcctgagtagctgggaccacaggcgtgcaccaccatgcccagctaatttttttcttttgcagagactggggtttctctatgttggccaggctgatcttgaactcctgggctcaagtgatctgcccgcctcggcctctcaaagtgctgggattacaggtgtgagccagcacaactggttgagtctactgtttttttttttattttattttattttattttattttttttgagacagagtctcactctgtcgcccaggctggaatacagtggcacgatcttggctcactgcaacctctgcctcccgggttcaagtgattctcctgcctcccaagtagctgagactacaggcactcaccgccatgcccagctaattgttgggggtttttttttagtagagatggggtttcgccatattggccaggctggtctcgaactcctgacctcgcgtgatctgcctgcctcagcctcccaaaatgctgagattacaggcgtgagccactgtgcccaaccaatttttactttttaaatggagacggggtctcgccatattgtccaggctggtctcaaactcctgaactcaagcgatcctcccgcctcagccaccccaagtgctgggattacaggagcgagtcaccgcgccccaccgtccactctcttaaacctcctgttggtaacagatgtgaacttgttgacaagagccttggggcccattcctttcaacatgggctgttaagggagaggaaattccctaaccactgggtccagtgcttttccctaccatctggaagttctgcttgggaggagctgggcattgtagctgcagagcctgggtccagcctgaagcccctcgtcagtaacagtcttcatcgcggaggaagcaggtgctcagcaacaagcctgcagaagtgcttacccccgtctcttcctcccctcagggttcccagtttgtcgagtgggcctcggcaggaaacctcaaaccggtgtgggcgagcaggggctgcccgcgggcctgggaccaggaggccgagggggcaggcccagagctggggctgcgagtggcgcggaccaaggccctgtggctgcctatgggggactgatgcctgagcgccacctactgcattttggacacctcacaccaaggggagatgcaccccacagacacctgggactttccccttctggttcctgtgtctcccaataaactctctgaccaaccctagctgtgcttctgcgagaagaaagggtgtagcaacttctggcagatatgaggcttttttcttttttttttttttttttgagacaacgtctggctctgtcacccaggctggagcgcagtggcacaatctcggcccactgcagcctcgacctctggggctcaagggatcctcatgcctcagcctcatatgtagctggggccacagacatgcaccaccacacctggctcgaggccattttagttctgaggttgagcagctcaggagccggctccagcacggtgctgtgtttgtgaaacagagaaaggggacccccgaggaccccagacagggccttaggactctcatatcttcttgtcttctccatctggtggctcttgctctctggttttctctaccttttcatggccccagaatccatatgcagtaaaggaactctctggaataaaattaaagtcctcctatatgacttttgtcaatttccatgatgtaaatgctcccaccgtgccggatttcaaggtacaggtgattaaacaactgcctgcgagatcctgaattgttaacaggtcagctcccatgagccaatacgagccgcttcagcacaccactgccttaggattctggttgtgggtgggtttttttggtttgttttttgttttttcgagacagagtctctctgtcggccaggctggagtgcagcggggtgatctcggctcactgcaacctccgcctcccaggttcgagcgattctcctgcctcggcctccagagtagctagaattacaggctcgcgccaccacacccagataattttttgtatttttagtacagacggggtttcaccatcttggcctggctggtttcaaactcctgacctcaagcggtccgcctgtcttggtctccccaaagtgctaagattacagacttaagccactgcgcacgactgttgatttttaaataaaggatcttgctctgttttttaggctgtaatacagtggcgcagtcacagcttactgaacccaccctcgacctgggctcaatcctcccacctcggccgggcgtggtggctcacgcctataatcccagcactttgggaggcc[135 bp omitted]gaggcagaagaatggcgtgaacccgggaggtggagcttgcagtgagccgagatcgagccactgcactccagcctgggcgaaagagtgagactccgtctcaaaaaaaaaaaaaaaaaatcctcccacctcagcctcctgagcagctgggaccacaggcacgcaccaccatgcctggctaatttttttttttttaataggcagagtctacctacgttgctcaggctggtcttgaactcctggcctcaagcgatcctctcgcctcagcctttcaaagtgtgggactgcaggcatcagccaccacacctgaagtagaattctttttgatgtaagaaacccactcttactagtttaggataaaagggagttttcagaggccaggctcggtgactcaggcctgtaatcccaacactttgggaggccgaagtaggcggatcacctgaggtcaggagtttgagagcagcctggccaacacagtgaaaccctgtctgtactaaaaatacaaaaattagctgggtgtggtggcgggcacctgtaatcccaattactcaggaggctgaggcagaagaatcactcgaacccaggaggcagaggttgcagtgagctgagagcacacacttcactctagtctgggcaacagagcaaggctccatc[131 bp omitted]aatcccgtctctactaaaattataaaaattagccaggcgtggtggcggcacctgaaatcccagctatctgggaggcaggagaattgcttgaacctgggaggcagagggggagcttgcagtgagccaagatcgtgccactgcactccagcctgggcaacacagcgagactcggtctcaaaaaaaaaagagagagagagaggagtcttctggaaggctacagagattccctagaggcaatagggcgatagggcaggacacacattgaggggccccaggacttggtcaggaaggagctagagcaggtcctttgtccatgggccacatgagctattggggcttgtatctctgcctctctgcttcatttaaatctttctagccagatggaaggtctgaccattgggtgcgacaaggcagctaacccaggctgaacaggaagtgaggcaggcagagggatcagggaagggaaatggatgatgaaggccaggacgggcgaggctttgctgcagtaacacataacccccgaatctgcgtgggccacaaccacaacattagtttgttgcttacactccctgtgctcatccggggctggcaggatccctgtgctcctccgagtggcacaggaaacttggctgatagaggcgctctctccatgcatcctccaccatccactccccggtcccttagacttccattcagaagtgacacctgtcacctccaccctcatgtgactggccaaagtgagtgtggccatgtccgagttccccaggatgggacctcgaatcctcctgctgggggggtgggggcagcagatgtttcaggacagtctgccacggatcagatgggtgagcaagagattcaggatgggcgtgatgggtcacacctgtaatcccagcattttgggaggccgaggcaggctgatcacctgaggtcaggagttcgagatcagcctggccaacatagtgaaacctcgtctctactaaaaatacaaaaattagccgggcatggtggcacgcacctgcaattccagctacttgggagcctgaggcacaagaattgcttaagcccaggaggcggaggttgccgtgagccgagactgtgccactgcactccagcctgggcaacagagtgagaccccatctaaaaaaaaaaaatgcttcagagattcagagatccacagatgtggaagagagcttctattttgtctcatgtaccacctcacccctcagtttggagttggagaagccgaggcttagagaggtcaaggggctggccaagctcccacagtgataaagctagtgctagggcgacacctgccaggcccaatgtgacaagatgcatcctgagtcctgtgtgccaagccttggcggggcaaagttggggcccggaggacggtaagacacagcaactgcgagttcccagagacagatccgggttccagccccagctcaccatgcactgggcgtgccacccagggagtcagccccactgcagcccccgctgcggggcgtccggagaacgcgccatctgcggcgtgagcggccgcctctcaccaccagggggcgcgctccgcctgggcccagattccaccccttgactgtctccccccaaaaatttcctttcactttcggtctctggctgtcacccggcttggccccttccacacccaactggggcaagcctggtgcgtgaggagacttggactctaggtccccaaggggcggagccagggtccccactcctggggcagggggagcagagggtggggggctgggttcccgggtccctaacctggggagggttctggggaccagacgtcgaggttcttagaagtggagatgaagagttttcaccgtaactggggcagacgcaggaagcctgggggaggaaggggcggaaactcagccacatcaatgggacgcgggaggggcggggaggcaaaggggcgggcagggcaggggctggggcatgagggtccgagacttgttcttctgtcccttccaagacccggcgacaggaggcatgaggggcccccggccgaaatgacagtgctggcgccagcctggagcccaacagtgcgtaaaccccagggacaagatcaggggagaggggaggcacaatgtcaggatggggcagagatgaggggagatggacgggagaacagatggacagatgacgaggaaataggaggggagatggacagatgtgaggggagatggataggagaggagacggacagaggagggggagatggacagaggatggggagatggacagaggagggggagatagaggagagggagatagagaggagtgggagatggacaggagcggggagatggacagaggagggggagatggacagaggagagggcagatgaacagaggagagggagataaagaggagggaggtggacaggaggagggagatggacagagaagggggagatggacagaggtgggggagatggacaggagggaagatggagaggagggggtatggacagaggagaggggagatggacaggagggggagatggacagaggagagggagatgaagaggagggggaggtggacaggaggagggagacggacagaggagaggaagagagacagaggaggggggagatggacagaggagggggagatggacagaaaaggggggagatggacagaggagagggaaggtggacagagccaagaacaaatgaagaggacgtggaccaagatcaagagagaagcaggcaacagtggtgtagaaggcagagggagggacagagctggaggaacccgggcgaggaaaccagacgtgaagatgaggtggttggagagagaccagcagagtgggggagatggggagagagaggggtggggcagagggggatgcaaactggacagcattggaccagaggcagagagaaaccgggaaagacaggcagagatggggccatgtctccagaaagtgtggaagaggcagaaggacacccagggaaggaggagcggggaagacagaacagtacaggtgggaagcccggaggagggggctgtgtgtggaacagcagagggctcccccagcacccgctcccctgcagacctatctcctcctgctgctgctgctgagctcgggactcagtgggacccaggactgctccttccaacacagccccatctcctccgacttcgctgtcaaaatccgtgagctggtgagcggcgctgccccggaccccctcatgtgatcccccttccccccacttttttttttaagtagagatggggtctctctccctgtgtttcccagggtggtcttgaactcctgggctcaagcgatcctcccaccttggcctcccaaagtgctggaattacaggcgtgagccactgtgcttaggggtgtcatccctttttaagggcaaggttctgtggcttcttctgggctccccctctcttggtcttgtccctctctctctggatctctgctgccacctctgggtccccacagttctgtttctcgctgttttcagccaggcctgatcctgttttctcccgcagtctgactacctgcttcaagattacccagtcaccgtggcctccaacctgcaggacgtaagtcatgttgggagggacctgggatggaggtggggaccacagactcaagatgctccaccgaggcgagtggataaccaggccctcccctccccaaacccaggaatcagagtcctcagcccctcctccctcagacccaggagccccggcccagcccctcctccctcagacccagcagccccgtgcccagctcctccctcagacccgtgggttctcccctctaggaggagctctgcgggggcctctggcggctggtcctggcacagcgctggatggagcggctcaagactgtcgctgggtccaagatgcaaggcttgctggagcgcgtgaacacggagatacactttgtcaccaaatgtgcctttcaggtcagccctcaacttaggggacaagtgaggggagggagatgccttcctacgaattagaagtaaagctccactaggccttattggcgatttggaccatagccacccaacgaaggtagagcgagaagcgccaccctgcagagccctgttcctacagaacaacacgtccccaggcaccggtgatggggagcagtctggtcccattctggggccccggtttcctaggccatgatgaagggtgccactgaggggttcttcccccaaaaaaaaacagggagagaaggggtctctaaactgaggaggccgggcgtggtggctcactcctgtaatcctagcactttgggaggctgaggtgggcggatcacttgaggtcaggagtttgagaccagcctggccaacatgatgaaatcccggctgtactaaaaatacaaaaattagccgggcatggtggctcaggaggctgaggcacaggaatcgcttgaacccgggagccagaggctgcagtgagccgagatcatgccactgcactccagcctgggagacagagtgaaactgtctcaaaaacaaaacaaacaaacaaaaacctctctctgagggctgggtgcagtggctcacacctgtaatcccagcactttcggaggccaaggtgggaggattatttgagcccaggagttcaagaccagcccgggtaacacagtgaaacctcatctctgcacaaaaataaaaataaattagccaggcatggtggtgcccacctgtggtcccagctactcagaaggctgaggtgggaggatcacttgagccctggaggtcgaggctgcgatgagctatgattgggccactgcactccagcttgagcgacagagcaagaccctgtctcaaaacatagaataggccgtgtatggtggctcacgactgtaatcccagcactttgggaggctgaggcgggtggattgcctgagctcaggagttcgagaccagcctcggcaacgtgatgaaaaccatctctactaaaatacaaaaacaaaattagccaggcatggtggtgggcacctgtagtcccagctacttgggagactgaggcaggagaattgcttgaacccaggaggcagaggttgcagtgagccgagatcacaccactgccctccagcctgggcgacaga[220 bp omitted]gaggcagaattccttgaacccgggaggtagaagttgcagtaagccgagatcgtgccactgtactccagccagggtgacagagcaagactctgtccccaaaaaataaataaataataaagtaactttgggaggccgaggcgggcgagtcacctgaggtcaggagttcgagaccagcctggccaacatagagaaaccccgtttctactaaaaaatataaataaataaataaataaataaataggctgggcacggtggctcacgcctgtaatcccacactttgggaggccgaggcgggcggatcacaaggtcaggagatcaagaccatcctggctaacacaatgaaaccccatctctactaaaaatacaaacaattagccgggcgtggtggcaggcgcctgtagtcccaactacctgggaggctgaggcaggtgaatggcgtgaaaccaggaggcggagcttgcagtgagccgagattgcgccactgtactccagcctgggcaacagagcgagactctgtcttaaaaataaataaataaataaatatggccaagcacggtggctcatgcctacaatcccagcactttgggaggccaaggtgggcagatcacctgaggtcaggagttcgagaccagcctggccaacatggagaaaccccgtctctactacaaatacaaaaaatagctgggcatggtggtgggcacctatagtcccaaccactgaggaggctgaggcaggagaatcacttgaacctgggaggcagaggttgcatttcaccactccagcctgggcaacagagtgagactctatctcaaaaaaaaattaattaattaaataaataaactctgagagccagagctcactgggccctgttgctgggcatcgccagcagggaagggcctttggcctgcggaggggcggtggggggatgacgtggtggtgacgtctccctcccctgctcccagcccccccccagctgtcttcgcttcgtccagaccaacatctcccgcctcctgcaggagacctccgagcagctggtggcgctgaagccctggatcactcgccagaacttctcccggtgcctggagctgcagtgtcagcccggtaaaggcttccaggcacccccactccttcccctcctgtcctcacggccgctcctcctctctgcacagtgcatcccagaccccatctttctcatattggttgtgacaagggcaagcttattcctctttctggagctcagtttaccaattttttttttttttttttgagacggagtctcgcactgtcgcccaggctggagtgcagtggcgtgatcttggctcactgcaagctccgcctctcgggttcatgccattctcctgcctcagcctcccaagtagctgggaccacaggcgcccgccaccacacccggctaattttttgtatttttagtagagacggggttttaccg[137 bp omitted]ctctgtcccccaggctggagtgcaggggtgctatctcggctcactgcaagctctgcctcctgggttcacgccattctcttgcctcagcctccccagcagctgggactacaggcgcctgccacctcacgc[255 bp omitted]cctcagccttccgagtacctgggattacagatgcgcataccatgcctggctagtttttgtgtttttagtagagatgggttttcaccatgttggccaggctggtcttgaactcctgacctcaagtgatccacccaccttggcctcccaaagtgctgggattataggcgtgagccaccgcgctcagcctattcactcatttaatttgtgacagtctgatgaggtaggtacaatgattatcctagttttacagatgagcaaactgaggcacagagaggccaagcagcccatccaaggtcacacagccagtggcagccaggcctctctttccttccttaccccagcccttctccttggtcacccagcctcctctttctccccagactcctcaaccctgccacccccatggagtccccggcccctggaggccacagccccgacagccccgcagccccctctgctcctcctactgctgctgcccgtgggcctcctgctgctggccgctgcctggtgcctgcactggcagaggacgcggcggaggacaccccgccctggggagcaggtgagcaggctgggaagagggggtgagggggccgagagggtggcccacttgtggctgacactttggggcccacaggtgccccccgtccccagtccccaggacctgctgcttgtggagcactgacctggccaaggcctcatcctggtgagtccttcctgggctatggggcctggactttgtgtctgcaggttgggagggtcactaggaggccatggaagggtggtgagcagt[156 bp omitted]tctactaaaaatacaaaaattaactgggcatagtggtgtgtgcctgtaatcccagctactcaggaggctgaggaaggagaattgcttgaacccaggaggcggaggttgcagtgagccgagattgcgccactggactccagcctgagtgacagagctagactccgtctcaaaaaaaaaaaaaaaaaagaaaaggaaagacccctctggggccacggagacagactggagaccaagccggaggctgtgggaaggcccagggtgaggaccatgactgagccagggctgggaccatgggatggagtggagtggatgggcagagagtcaggggtcagagatcaggagggaccggcctggggcctgacaggcttgagttggcacagatagccctggtccagtgatggggtggacaggggggaacctgggggaggagtcagattagggaaagacatggagctcactggggacctgaaggagcaaggggccctggggagatctgtggatgtgggagtttgcaagcctcctgggacaggaaggaaatggcattccagaaagagggaactgcctttggaagccctttggtatgagaaagctcagggtgttccagtaacttgggccagcgtggggcagcaaggagccatgggaggtgtgagagggaggaaaggagctgggaacaggtgtggagggtgcaggcaggtaggcaggtgggccaggagggaagaaggaggggaggccccagcgggtcccctaacatttcaaatctaacattttgtagtaattgctcgcacatatagtgccttggtaatgcaggcctcatgtggggctggcttgcttgctttatttttttttgagatggactctcactctgtcacccaggctggagtgcagtggcgggatcttggctcactgcaacctccacctcccaggttcaagcaattctcctgcctcagcctcccaagtagctgggattacaggcgcccgccaccatgcctggctaattttttgtatttttagtagagatggggtttcgccatgttggccaggctggtctcaaactcctgatctcagctgatccgcccgcctcagcctcccaaagtgctgggatgacaggtgtgagccactgttcctggcccatgctgggctttccacaaatgaactcacttccttgagaagttcgtgccattatgatcccaaggcatagagaggtaaataatttgccaaaagtcacacagctcaagggtgacaaccaagatttgacttcaggttgtcttttttttttttttgagatggagtcttgctctgtcgcccaggctgtagtgcagtggcatgatctcggctcactgcagcccccgcctcccaggttcaagtgattctcctgcctcagcctctggagtagctgggattacaggtacccaccaccacactcggctaatttttgtatttgtagtagagacggggtttcaccatgttggccaggctggtctcgaactcctgaccttagctgatccgcccgcctcagcctcccaaagtgctgggattacaggcatgagccaccacgcccggcctcgagtttgtcttgatccagcatctgtgcccttcactctgctgcctcagtttcctgatctgtacaaaaggctctaataatagtccttccaccatagggttgttatggggtgaagtgaagtgacacaggcaaggctcttagagcaacgcagtggaaacggcatgtgagccacctgtgcgattttcactttcctggtagccacattttttttttttttttcctgagatggagtctcactctgtcgccaggttgaagtgcagtggtgtgatctcagctcactgcaacctccacctcccgggttcaagcgattctcctgcttcagtctaccgagtagctgggattacaggcacgcgccatcacgcccggctaattttttgtgtttttagtagagacaaggtttcacca[139 bp omitted]ttatgcagtatatccaaaatgttgttatttcaacatgtaatcagtatttctcaatgattaatgagacattaatcagttggaatcattcatcattttgggatattttacattcttttgtcatactaagccttcagcatccaacgtatagtttatttatttatttatttttccttttgagatggattctcgctctgtcacccaggctggagtgcagtggcgcgatctcagctcactgcaacctcggactccctggttcaggcgattctcctgcctcagcctcccgagtacctgggattacgccaccacacccagctaatttttgtacttttagtagagaccgggtttcaccatgttggccaggatgatctccatcccctgacctcgtgatccgcccgcctcagcctcccaaagtgctggattacaagtgtaagccaccgcgcccagcccagacaataaatttttatcagaaatgcttcatctatatttaaatttcatgaaatttacagttgccaaaagtagactcacatagtcaagttgttcaaaacatacattaaaccagcctgggccacatggtgaaaccccatctctacaaaaaattttaaaaagtagctgggtgtggtggcacatgcctgcagtcccagctacttaggaggcaaagtaggaggattgcttgagcccaggaggtcgaggctgcagtgagccctgattgtgccactgcactccagcctgggtgagagagcaagaccctgtctcaaaaacaaaaaaaccacacagaagagtttagaatcccagttgctatctctgggaatcatcatgattgctaagaccggtatct[138 bp omitted]tggcacgatctcggctcactgcaacctccgcctcccgggttcaagtgattctcctgcctcagcctccccagtagcttggactacaggcgcgtgccaccacacccagctaatttttgtatttttagtagaggtagggtttcactatgtttgccaggattgtctcgatctcttgacctcgtgatctgcccgcctcagcctcccaaagtgctgggattataggcgtgagccaccacgcccagcctatctttttttttttttttaagaaaaggtaatacattgagcagttttcctcccaacctagtccctgtccaatctgtttcctgtcttaaatttattttttattataatttttttttttttttttttttgtgagacagacttttgctcttgttagccaggctggagtgcagtggtgctatcttgactcacggcaacctccacctcccaggttcaagcgattctcctgcctcagcctctggagtagcttggattacaagcgcctgccaccacgcccaactaatttagtgtatttttagtagagacggggtttcttttgttgttgttgttgtttttgagacggagtctcactctattgcccaggctggagtgcaacggcacgatctcggctcactgcaacatctgcctcccgggttcaagcgattctactgcctcagcctcctgagtagctgggattacaggcacacaccaccacacctggctaatttttgtatttttagtagagatggggtttcaccatattggccaggctgatctcgaactcctgacctcgtgatctgcccgccttgacctcccaaagtgataggattacagccatgagccgccctgcccaactaatacctgatattaattttattgtatctcacccagcatggtggctcacacctgtaactccttggcagatcgcttgagcctaagagttcaagaccagcttgggcaacatggtgaaaccccgtctctactaaaaatataaaaatgagctgggcatggtggcgtgcacccgtaatcccagctaactcaggaggctgaggcaggaagaatggcttgaacccgggaggcagaggctgcagtgagctgagatcatgccactgcattccagcctgaaacagagcaagactgtctcaaaagaagtttaagtccagcctcaaactcctggactcaagtgatcctcctgcctcagcctcctgagtagtgcaccggccccatctcaagtgttcagtattcacatgtggcttgttactcccgtattaaagagcaaaaatagagaacgtttctttttcttttttttctttttttttttttttttgagatgggagtttcgctcttgtcgcccaggctggagtgcaatggcacgatcttggctcaccgcaacctctgcctcccaggttcaagcgattctcctgcctcagcctcccaagtagctgggattacagacatgcaccaccatgcctagcaaattttgtttttgtttttgtttttttcttttgagacagacttttgcttttattgccaaggctggagtgcaatggtgcaatctcgactcactgcaacctccgcctcccgggttcaagcaattctcctgcctcagctaattttgtagttttagtagaaacggtttctccatgttagctaggctggtctcaaactcccaacctcaggtgatccgcccgcctcgacctcctaaagtgctggaattacaggcgtgagccactgtgcctggccctaattttgtatttttagtagagatggggtttctccctgttggtcaggctggtctcaaactcccaacctaaggtgatccaccagcctcagcctcccaaactgctgggattataggcatgagccaccgcgcccggggaaatatagggaacatttctatcatggccacgttctcttggacagcaatgccctagcacatagtaagcgcttgctgggaatggagttgttttgggcataaatctgtggcccgccccaagctaagctactttccctctcctctctcagcggagccttaaacaacgcagtgagacagacatctatcatcccattttacaggggaggatactgaggcacacagaggggagtcaccagccagaggatgcatagcctggacacagaggaagttggctagaggccggtcccttccttgggcccctctcattccctccccagaatggaggcaacgccagaatccagcaccggccccatttacccaactctgtacaaagcccttgtccccatgaaattgtatataaatcatccttttctaccagctctggccaggtctgtctatggatgggtgtgaatggggtagttttgatttcagaatcttggtttttgaattgcaatgcaatgtttcattcaatacgtgttttctgaggtcccctggagccccgggccggcgctgggcaatgtcagagcctggatttgagtcagaaccagcccaggtgccccaggtctccttggctatggacgagaagacaagggattcagcgagcctgggtgcaggatgccataggctactatggagataaaacagaggcagtgtgaggggcaactcacccaggcagggagagcagagaggctttccagagccaaatggcattgcgatggtgacaagccagatttggagggggtggggagggcatcctgggcaagggacccagctgaagcaaaggccgacagtccagaaagtgagaagttcctctgaggaacgctcagtggattggtgcagccaggcaactagaagccattccttgatccactcttagagcccctggggaagaccacctccatctgttttacagatggataaactgaggcccagataaggccaagggtttctccaggtcacagtgaagtcgaccagacacaggaatccaaatctctaagcctagaatgggcaaggctccggggctcacgccggtaatcccagcactttgggaggccgaaacgggaggatcgcttgagcccaggagttcgagatcagcctggccaacatgtcagactccccccgttcccgggccacaacaaaatatatatatatatatatattagccaggcatggtggcgcgcccctgtagtccaagttactcgagaggctgaggcaggaggatcccttgagcccaggaagtggaggctgcggtgagccatgatcgccccacagcactctggtgtggacaacacagcgagaccctgtctcacaaaataaagtaagcccggactgagtgcggaaaggcgggcctggcgggtctggtctccccatgcgggccaccagaggccctgcagccttcagtcgcttgaaggggtaatggcgcttccactcacaaacatggcggacagagcgtgtgaacgagatgaacagcccctcaaaaatatggccgccgaggctggacggccgtgccccagcagcaccgcctccgcgccccacgtgatctctcgccgggcacagcgctgaccgcggaggtccaaccggaagaatgtccggattggacattcggaagagggcccgccttccctggggaatctctgcgcacgcgcagaacgcttcgaccaatgaaaacacaggaagccgtccgcgcaaccgcgttgcgtcacttctgccgcccctgtttcaagggataagaaaccctgcgacaaaacctcctccttttccaagcggctgccgaagatggcggaggtgcaggtatgggctccgcgcgggccggggcggcaaggggccgggtgggatccaggccggaatggggtcgcaccctctctgtcttgcatgttttgcggagcttaacatccataatgaagcaaaatggaagtcttttgggataaggggaatctgtaggaaatgccgcggctctctttaggcctagggttggctacaatgtggcatttccttctcgaggcgagggtgatagagcttccagcacaggacaggtattttgcaactagattttgcttaccttgaactcgggtagtgggtgggggccctggggtagagtcttggccgaattggacccttgtgtgtcctcagcgatgaggaacacgcggaagtgtggccgggcggtctcggggcaatgagaaactgagttttggccaaaatggaaggtatttttatcccgctcagtgcgcgggctactttgatttcacgtggaggtgttaatcggggtcccctgcagctccggttcttttaattctcaatgcctttctgcggggggtcgagagctgttggctgcggggcactctggaatgaactcgttttccgtcgttttggggattggcgattgtcctgaggcgtgttactggaagtcgagagctgtgatgaatggttccacaaggatgggacatcttttgggcctgacacctgggggccctttccctggctcctggtgtagctacttaagtataaaggagggattggccctggaaaggtttctttgtgagtagtctgttgttggggcgggtgacatttcagagccaggccgatctaggcaagttgtgttcaccaagcatgtgtctttgtgcctagcacagttcgcaatgttttgcgtagttcagttaaccatattcctgaggcagttactggtatccttgttttacagaggaggaaattaaattggaattggtgattttgggccaaggtcacgacttcaggaagtctgtctggattttagagtctttgtaccaacgcttacaaagcatgtgtaacaaccagtgtgtgcttcatgcttttgcattaaaacaatgaggatttctacttttagtgttttttctgagacggagtctcgctgtgacacccaggctggagtgcaatggtgcgatcttggctcattgcaacctctgcttcccaagttcaagtgattctcctgcctcagcttcccgagtacctgggactgcaggtgcctgccacgacgcttggctaatttttgtgtttttagtagagacagggtttcaccatattggccaggatggtctcgaactcctgacctcaactgatctgcccacctaggcctctcaaagtgctgggattacaggcgtgagcccctgtgcccggccaggatttctactccggaggaagctgaggttcggtgcctgagcagtttaccggggaaagcagagtgctctatagcagagctagcatgggcttttgactactctgcctaatctcatcccacctgaaattcggttttcttccaaattaaatttgtggtagaaacatcctatacattagaagagaattagattgtgttaacatcctacaattgattggccacagtggctcaagcctgtaatccgagcattttggaaggccgaggcacacggttcacttgaagcgaggagtacaagagcagcctaggcaacatggcaaaaccctgactcaacaaaaaaaaaagtacaaaaattagctgcgtgtggtggtgcgcgcctgtagtcccagctactcatgaggctgaggtgggaggatagcttgatcctgggaggtcacaggatcacaggacagcctgtgcaacagcgagaccctgtctcaaaaccaaatcctacagtttattagttacaaggtcttgtaactgggtagtcagtgggcagagccttgctggtcttcgttcaaatccaattgctttgcaaaatacaatctgagcataaaatactcatagaagaactcagatatgaggggagtttgggcctcttaaactgctcactcactgatcctgaggcagccttgctttctcagtccctgttcctcatctgtagaacggggctccgtgcatagttcccagctctgatggctgggtgcaaggcacgctgttggcacggtaggacaaaagaagggaatgcttgcttgtgaggacaatcaaaggctgtccttgtctctgagtccttttgcccttgtctcccacaggtcctggtgcttgatggtcgaggccatctcctgggccgcctggcggccatcgtggctaaacaggtactgctgggtaagtcgctgctcgtggcccctctgtcatgggcccccgctggaggtcagtgatgagcaacattcaccatctttcgtttgagtctcacggccatgagatcaaccccatgcaccgctctgagacctgccagccactcttccccagggttggggactccaggctcaagaagtaattatgtattaggctagtttttcatttaaacaggaacttagctctggcaagtactgcgctgtgtctggagggtgactgcataggcagtggtgggaccctcaggcggctcggccctgctaagcctttccctccctctaggccggaaggtggtggtcgtacgctgtgaaggcatcaacatttctggcaatttctacagaaacaagtgtaagttaggacctgggaggagcactggagagggtctccctgtggggtgttgaggctctgaaagcaattgcagccgtgttgggagaggctacttggggtttctgagaaggcccttggaagtggggttttgggggtgctggtagactgggcaggcctcacactctcccctctccctagtgaagtacctggctttcctccgcaagcggatgaacaccaacccttcccgaggcccctaccacttccgggcccccagccgcatcttctggcggaccgtgcgaggtgagcagagcgtggggactgcaggtggtgacgggcaggcggccggtgatgagaacttctcccactcacattcgagtttcccgaccatgagatgactccacatgcactaccatctgaggccaccccatgggcccacctcagtggggtgggtgggcatccttatgaggccctctgactgggcctgctatctgtcacccaacaggtatgctgccccacaaaaccaagcgaggccaggccgctctggaccgtctcaaggtgtttgacggcatcccaccgccctacgacaaggtgagctatgccaaaccccacaggcagcggccttacctgtggcgtccatgatgttccgcaactacctacattgtttgatcctcatgaaagcagcactggctgagacgccagtccagccgacctccttccctgtctgtccctcccgggctcttaagcccctctctttctctaacagaaaaagcggatggtggttcctgctgccctcaaggtcgtgcgtctgaagcctacaagaaaggtgagtcccagcttacgctgcaccatctacttgggagatttcaggcctgctgagggacctggggacctggagcctggcagatgatgtccttatctcacgatggtctgcggatgtccctgtgggaatggcgacaatgccaatggcttagctgatgccaggaggcttgggtgggtgcttttctaacaggcctgcagagaacagttgcattatgatatgcccagctgtcagtcacctcccagctctcaacagctccggctcttcagggtgtgggggcttagatatccttacaacttcatttgttcaccccccccccccccccccgcagtttgcctatctggggcgcctggctcacgaggttggctggaagtaccaggcagtgacagccaccctggaggagaagaggaaagagaaagccaagatccactaccggaagaagaaacagctcatggtgaggccaggggctggtgctgaggggggcatctcactcctggacaggcctggcaggtgccttgctcacagagtactcttaactggcaaaggaccagccggggttggggtgggatgcagtccatgtaatgagggcaatgcaacccctcctgaccaccaccacctgcacttattcttggcagaggctacggaaacaggccgagaagaacgtggagaagaaaattgacaaatacacagaggtcctcaagacccacggactcctggtctgagcccaataaagactgttaattcctcatgcgttgcctgcccttcctccattgttgccctggaatgtacgggacccaggggcagcagcagtccaggtgccacaggcagccctgggacataggaagctgggagcaaggaaagggtcttagtcactgcctcccgaagttgcttgaaagcactcggagaattgtgcaggtgtcatttatctatgaccaataggaagagcaaccagttactatgagtgaaagggagccagaagactgattggagggccctatcttgtgagtggggcatctgttggactttccacctggtcatatactctgcagctgttagaatgtgcaagcacttggggacagcatgagcttgctgttgtacacagggtatttctagaagcagaaatagactgggaagatgcacaaccaaggggttacaggcatcgcccatgctcctcacctgtattttgtaatcagaaataaattgcttttaaagaaatctggcgtctttgcactgtgtctgctgtggaggcaggcccctggcaaatggggggtgaggagcttgaagagggtagaatgggctgtgctaatatacagaatatatgtaacttgctataaattgaatgatcctttatagacaccgtttacaaaccaaagacataaaatgtggccagcagtgcctggtgcttcctagttaatgtaaagctgtctcattctaattcagctgcaaagtatggacccatgccctgctgccaggctgctgtagtcccggcggtctgtagagactagcattttgcaaatgataagcactagaataacagataacgctaggctttatgcactaagagaacccattagatctgccagtctgaatcccagaaagggcactgatacagagcatttagtactaggtagcaatttcataaaatgtccctggtcaaagcttgctggagcaggccccgttcccattttactgatgtctagcagtcgtgttcagtaatacgtcatacccaggtctccacgctaaacagcctaaacactaaaagtaaacatgctgtgaagtaaaggaagctagattcatgctgtccttgcggttggatgccaagattcaggagtaactgtttgttacctgtatacttacatgtacaaccttaccccagagaaagatgagtggacagtgatgtgcattgtgttgatagcagattataacttgccacaccattccatcaggggcttattaacctttccagaagagtctgaagagaccgcagtggcttgtgttttccctgagaatcagtgaacatgggtggtgcctacccctgccagagtccccacatggattctcatccaccagagaagccgactccagaaataaccagacttagagcataatcttcaatttcaccaattccatgtgaaacggcacaattatcctccaaaagcatgatccattagcaaatgggaatgtgggctttataaaaatttttaagactgagaagacaccatcaggaaagacgagccacagactaggagaaaacatttacaagtcatctctttttgaaggtcttgtatcctgccataaagaactcttggccaagtgcagtggctcacgcctgtaatcccagcattttgggaggccaaggcgggtggatcaactgaggtcaggagttagagactagactggccaacatggtgaaaccccacctctactaaaaatacgaaaattagctggacgtggcgcagggcgcctgtaatcccagctagtcgggaggctgaggtaggagaatcacttgaacccgggaggcagaggttgcagtgagccgagattgcaccactgcactccagcctgggcgacagagcaagactccgtctcaaaaaaaaacaaaaacaaaaaacaaaaaaaactcttacaggatgtggtggctcacacctgtaaccccaaccatttgaagtgagaggactggcttgagtccaggagttggagtccagacagggcaacatagggagactctgagttaacaagaattttttttttttttttgagacagagtctggctctgtcgcccaggctggagtgcagtagcgcgatctcggctcactgcaagctccgccccccgggttcacgccattctcctgcctcagcctcccgagtagctgggactacaggtgcccgccaccgtgcctggctaattttttttatttttagtacagacggggtttcaccgt[134 bp omitted]cactaactgatacacaatacacaagccactaaccccacttgtggctcctgagcacttaaatatgaatagagtgaggctgggtgcagtctcacctgttcccggaactttgggaggccgaggctggagaatcacttgagcccaggatttcgagaccagtctgggtaatatagcgagaccttgtccctactaaaaataaaataaattagctgggcatggtgacacatgcctgtagtcccagctacttgcaaggctgaggtgggaggactacctgaggctggggaggtcgaggctgcagtgagctatgattgagccactgtactctagcctgggcgacagagagataccctag[197 bp omitted]ctgaggcaggagaatggcgtgaacccgggaggcggagcttgtagtgaaccgagatcgcaccactgccctccagcctgggtgacagagcgagactccgtccaaaaaaaaaaaaaaaaaaaaaccgtaatattcagctatagacttgtgctgttcaacacagtagcctttagccacatgtggctatttagatataacacaatcaaagttaaacatttatgtcctcagtcataaaagccacatttagagtgccagtgactaccgtgtccaccagcgcagatatagaaaatttccatcacataaagttctactagacgatcctgttatcttcagaaaaacggcagaaggatcgctccacgccaacccctggcaccaattaaatcatcgtctgcggatgaaatgaggagagagtagctttctttctctttttttttttttttgagacggtctcgctccgtcgcccaggctggaatgcagtggcgcaatgatagctcactgtagccacgacctccccagctcaagcgatcctcctccctcgacctcacaaagtgttgggattacaggcgaggcgcactgcactcggcgagagtaactttctttctttcttttttttttttttgagacggttttgctgttgttgcccagcctggagtgcaatggcgcgatctcggctcactgcaacctccgcctcccaggttcaagagattctcctgcctcagcctcctgagtagctgggattacaggcatgcgccaccatgcccgactaattttgtatttttagtagagacggcgtttct[143 bp omitted]tgtcgcccaggctgtctgtcggccaggctggagtgccatggcgcgatctcagctcactgcaaccttcgcctcccaggttcaagcgattctcctgcctc[134 bp omitted]tagcctcccaaagtgttgggattacaggcgtgagccaccgcgctaggccgagagtaactttcactgcacctctgaaagttcgtgggcagctcctgcccctaacaaagatggcgacgccgccacacatgctcctagcactccccggccgcccacccttcaaaaagatggcagccgcctcatccggtttgaaggctgaacgaacagagccacgcggtatccaaatcccacgggagcctacgccacgccgaaacaggatggactccgtacgactctcgcgataatacgggcgggctgaaggctggtcacatcttccctgcctaaataatcgcgcccggcgttgtggggcctaagactctcgcgagacaccgtctagcacttcccgcccgtcagtccttcacagtgcccgaatcgcccgctggtttaagtgcagcctgtcaatcagagcagctctcgaggccccgcccaaggccgtgctgcgtttctccttacgtcacttcctctccagcccctgcgtaatcgataaggaaacccggacgctgctgcccctttctttttttcaggcggccgggaagatggcggacattcaggtgcggactcggggttggatgccagggtgcggggtccgccttggccttcaggggcgcgtccgggagggcagagcccggcggccaagttcgggggttaattccgggcgtccgtgattattttctagagattaactggagtggagggcgcttgcttttgtttctagatgagtgcttcctaattcctgggggctcctggcgttaatggaggctcaagcgttttaggacttaccttcttaaaaaccaagtttaagaaggtttttttggagttctccggtcttcaggggtaattctgtggaaacggactcctaagggctaatccagggagcctgccgtctggtatttaattctgaatccttatgtactacataaggagtgaatcctgggtgggcgatcttgggtcttggagaatgatcctcgctgaaaggtgtccagggtgtgagagggttgatcctggtttagaggatgaattttgcaatccctgagaggccttctggagtatataaattgaaataacctcgggcttagatctgagtatgaattacaggtaaggtcagggtggtcatgtcttagagggtgattctggggcaccaggccttggacgccggcgctttgcaagtaaatgtagagcatggggtctgggaggttctgggaaggtctctagggctggttggctgccggcttcaaacttagcagctcatcagttttctcctcataatctgtagactgagcgtgcctaccaaaagcagccgaccatctttcaaaacaagaagagggtcctgctgggagaaactggcaaggagaagctcccgcggtactacaagaacatcggtctgggcttcaagacacccaaggaggtgcggggaacctcagaagaaagaaggggaacctggcgttcctgcacgtgtgcccacgacgagttgccctgcctgcatctaagtggcttctggggctgctgggaattgtagttgcttccctgaggccacgcccctggctcttttaaggaaccgcccgcccaaggctcactcctttatctttcctatcctttcaggctattgagggcacctacattgacaagaaatgccccttcactggtaatgtgtccattcgagggcggatcctctctggtaagtgcgggagttactggtgtctggggcctgaaatactgaaagaagggtcttggggcccagactcctgggtcctgggtgagaggggtggttaggaatgcaaacttgtaggtccaggtacattggcagatgatgtttgttttcacgatggtcttcagatgcccacgtgggcactgctgagaaagccacttggtaaaactgatgccggaaatggggctttttgggatccctgctcagctgcttctgagtcccagcatgccctgggttacctatggccctctttcccatgggacctgacctatgatcggcccccgctcctaggcgtggtgaccaagatgaagatgcagaggaccattgtcatccgccgagactatctgcactacatccgcaagtacaaccgcttcgagaagcgccacaagaacatgtctgtacacctgtccccctgcttcaggtgagcgcagtggcccatcaggttgctcaggccacgctctctcagccttcagattccagatcggaccaatttaaggccaactgagggagggaaagactgaggtggcatctctgggaagccccagaatctcaggatttgtatatcatatgttcttcagaatcaaagcgttctacagggtgaatatctctacctgaaatgcttggaaccagattttggaatgttctcgcatacatagtgagatgttttggggatgtgacataggtctaaacaagaagctcatttgtttcatatacaccttattcacatagcctgaaagtagtcttacgcagtgcgttttataattctgtgtgaaacaaagtttgcgtacattgaaccattggaaagcaaaggtgtcacgctggtattgaagaagtttcagattctagccaggcaccgtggctcaagccagtaatcccagcactgtaggaggctgaggcaggaggatcccttgagcccaggagtttgagaccagcctgggcaacatggcaaaaccctctctctacaaaaaatacaagtttgccaggtgtggtagcatgtgcctgtagtctcaggtcttcaggcggctggggtgggaggattgcttgagcccagaaagtggaggctgcagtgagccgagatggcagcactgctctccggcctgggcgacagagtaagaccctgtctctcccacacacacacaaattcagattttgcagcgtttcagaatttttggattagggtgctgaacctgtaataggcaggtgcgtttgaaccaaaaggttaggatgtcataccagatgggaacctcagaaatgttggaattaaacgtttgttcattccctcagcatgttttagttagagcttatcacgtaccaggtgtggtgtgagatgtttggggttcagtggtgagccaggaacaaagtcctgctccctcagagggcaccttcaagcagtgtgggtgccagatgacagccaagtataaccagaatggggatgtgggcagctgatattggtggccctctgggcggggaggatcttgggagcaaggtgaggagtcctgtgggtggagaggagggtggcccaaactgatgctgagcgataagggacctgtggttgtcagtgctgcaggatccccctgctgctctgctggggaagggtggtgaggctgctgacaacttgggggcctccagtttgcttgtgaaatggagctcgtccaccccagcggtcctcggaggggtggtggcctgctctgtgtacagcgttgagcttggtgcttggcacaaaacttgtacgaaaggaggggacaggttgaattggcgagtagagcttggttggggtttggtggagccgaagcagagagcctttagcctggtgaaggggagggagggcctcctggggtctgctggggtggcccctcctgaggacatggccctacctgcctccacagggacgtccagatcggtgacatcgtcacagtgggcgagtgccggcctctgagcaagacagtgcgcttcaacgtgctcaaggtcaccaaggctgccggcaccaagaagcagttccagaagttctgaggctggacatcggcccgctccccacaatgaaataaagttattttctcattcccaggccagacttgggatcttccgcgcctttaccagagcattggtgggggtgggggtgtgcctcggggaattgggcagagctgctgtcagagaggctgcctgcccatgtctgtgggtgaggacagtggagcctgaactgagatgcctgccttcccctgggtctccttctttggtccttgtcaccttttcggtgtctgaataaggctgattacctggcgttgcgctgtccccccgccccctccggtctctggggaggaagtgagtgacggcggaggcccctgggtcctccaggccctggtctgtctctttcctgaccacctcgggtggggaggggaagaagctgcagcccccccctgctgtgggcatgggctcacccaggtagagtgggatgtgctgaggccctgttgtctggctgtgaagtgtaaaggtcttggctttagcctgggcctcctatccctccttacagccaaggatgggggccccatgcacgcaccacacacgcctagttgggcaccaggcctatctgcagatgaggaaactcatctgggagaggccaagccctccacctgaagtcccagtgagtagctgagttacaggtctcagattctagaaacttcctctgcgccagctgcctcaaaatcgcagtaaggaaattggtggtgtgggcaagtggcatcatgaggctcccctggagcctgttcagtggtaccggggcccaggctgctgggaaggaagtgggcaggaagcgtccggagacggcccaacacacacaggccgcagagatgggggccttgagaggaacaggacaggacacacggtggcccagggttgtggcacatggggaggaggggttttgcagagctggggagagcacagaccaccgcgagaggcaggtacaatagaaacaggtgtactttgcgcatcacacagaggtggggacgacaggcatggggtgggggcggtgaggcaggagcgcaccagaggatatgtgggacccgaaggggagagacgcataaaagccgcagcagagatgggagtacagggaggggaggtcccaatgcccgctcacctcaccccttggggcctgccggtgccggggtccccaggtccctgtcccccaggcctgtaccagggtctgagcccagcactggtacaagggttgggagacagggccatggggagaggagccgccgctgccgctgctgcctcggggacgctgcctccccgtgggcccagtccctgccttatacccaggtccagggagggcgggggttcctgccagaggaagtggggccgcatcaaagagggcaggaaggggcagggacaggttggggggacgccaccctgagtcgcagaaactgcacacccactccaccctatgctgggggcagtagagaaccagcaaggggcaaagagggagtgtggactccagagggaggggacggagacccagaggggaataggaggttgcggccccctcccctcagccgcaggtgtttccgttcgggtggggctgctgtgtttacaacaacagcccggctccccggtttcctccctgattgttggggcgtctccttggcaccccatcacgtcaggtggtgtgctgaggtcagagtgtgtgctggggaaggacctctgctgggcctgctggattgcaaagagcaagtttaaaagaccccctcggacctcttgacaggccttccacctgaagagtggggataaggaccataggttctttttatttttttatttttattttattttattttatttttgaggcagattcttgctctgtcgcccaggctggagtgcaatggcgcgatcttggttcaccgcaaccttcgcctcccaagttaaagcgaatctcctgcctctgtctcctaagtagttgggattacaggcatgcaccaccacacccagctaattttttaatttttagtagagacggggtttcaccatgttggccaggctggtcacgaactcctgacctcatgatccacccatattggcctcccaaagtgctgggattttacaggcgtgagccactgcaccctgcccacaggttatttgataacccaaggagatacagttcctaggtcagcgggttcccctgtctcccctcccacctgctctccctctcactcagccccacacccccagcacccaccagacctgctgttcctctgagcctcctcaccatctgttccctctatgtggaatactctgacctggagtttccacctggctccctccctcactctctttgtctttaattaagtgaatgaattaatttttttatttgttaattgtttatgaagagaaactatttcttagcccatatattcatgtgtcatcgttcaggaacaagtcagtgacaaacttctaggtaattcaacctgaagaaattctttatattccaagatcattgcactctgaaagataccagccttccagccaggtgcagtggctcatgcctgtaatcccagcactttgggaggcc[132 bp omitted]gaggcaggagaatcgcttgaacccgggcagtagaggttgcagtgagctgagatcgcgccactgcactccagtctgggtgacagagtgagactccatctcaaaaaaaaaaaaaaaaagataccagccttcctcatctcaaaatctttcatggaatcgtaatttctgtagaaatctgcatatgccttctttcttggttcagccacagcaaacatatagaaagctgcagcccccagggataccatggatgcttcaacaatatgaaatcacagacgcttggccagaaggccacacatctgaggctttggcaaaactttggaagccatggtagttactgtccttgataacgtatgtcagcctcaataccaacgtccttcctgactgatggaaaaatggatggtgaaggaatgaattatgtgaagttgccacattctggctggggggaccttgacccctaggcttcaggggctcaataactggaagcagtaaagctgagccagaggccccagaggtagcagagacccgccgaggctcttttccaacttctggccctgtagctccctagctgtgtgtgaccttggacaagagacccactcctccaccacagagcctcagtttcctaatctgtaaaatggcttcttgcctccctgccctattgggaggatcaatatgctcatgtgagccaggtcccgtggctcacggctgtaatcccagcactttgggaggttgaggcaggcggatcacttgaggtcaggagttcaagaccatcctggccaatgtggcgaaaccatgtctctactaaaaatacaaaaattagccagtgtgatagcgcgcacctgtagtcccagctactcaggaggctaaggcaggagaatcgcttgaacctgggaggcagaggttgcagtgagccgagacagcactccacctaagcagcagagggcgactcagtctcaaaaaaaaacaatgctcgtgtgtgataatgggacagaaccagtcctgattaagtgtacactggaaagtaacaatgccgggggccctcagcttggtgttggagaaaggcccatagtgtcatgttacagcatcctgtggggccccttgggcaggcttaaggaccagggcctctggcaggcagcccttgctgtaatggacccacggtttttattttaatatttgttgtatggttgcggaatcctggctccattacagcaagccctggtagtttgtcacgggatgttgagtctgttttagcatgcctctggaatattctgtcgaatacctattatagggggccccaatggccttgccttttcacaggaaagttagcttttatagtggggttctgggtttataatgatagcggtcaggccaggtgccggggctcacacctgtaatcccactacttagggaagccagggcaggaggatcgcttgagccaggagttagagaccagcccgagcaacaaagggagactcctgtctctatttaaaatatattaggccaggtgcggtggctcatgcctgtaatcccatcactttgggaggccaaggcaggtggatcacgagtcaggagttcgaagccagcctggtcaatatggtgaaaccccatctctactaaaaatacaaacattagccagatgtgtagcggtgcctgtagtcccagctactcgggaggctgaggcaggagaatcgcttgaacctgggaggcagaggatgcagtgagccaagatcacaccactgcattccagcctgggcgacagagtgagaccccatctcaaaaaaaaaaaaaattttgctgggtctgtagtcccagctactcgggaggctgaagcaggaggatcacttgagcccagaggtccgagtctatagcaggctaggatgacaccactgcactccagcctgggtgacagagtcagaccctgtctcaaagaaaaaaaaaagacaggcatcaaacctaccgtgtgaaaacagggcaggtcttgattatcttgtattgcggccctgcacctcctgcagcaggtcatgggtctgtgatattagagccggatggccatcattgctgcagcctcctgtgggctattataatactaagtaaggccttgggctcctgtgacaggccctgctgatattacatggttgcaatactcaggttaaattataggccagc[139 bp omitted]aaccccgtctttactaaaaatacaaaatttagctgggcgtggtggtgggcgcctgtagtcccagctactcgggaggctgaggcaggagaatcgcttgaacccgggaggcgaaggttgcagtgagccgagattgcaccactgtgctccagcctggtgacagagcgagactctgtctaaaaaaaaaaaaaaaaaaaaaaaagttatttatataggaggcacctgagctcattgaactagtcccaaggtgtgtgagtggagtctggaaattgaattggagtgtgttccaggagtagttaagcagacccactgccgagtgtcagcactaccctgagcccaacaggaattcctgggtctaacactgtagtaggtcctggctctattacgtattatagcaagacaggccaggcacagtggctcagactgcaatcccagcactttgggaggccaagatgggaggctctcttgagcccagcagtttgagaccagcctaggcaacataggaagaccccatctctacaaaaaaaacttaaaaattagccaggtgtggtggtacgtacctgtagtaccagcgactcgggaggctgaggtgggaggatcgcttcagcctgggaggtcgaggctgcagtgagctattatcatgccactgcattccagcctgggtgacagagtgagaccctgtctcaagaaaaaaagtaaaaataaaagaccgatggatgtttcagaggtcagtatagatttagctagaacattctagcagaacaccaacgatgttctagatgagtttgaggaacacatcaagccttcccagggacattcattctacaaatgtttattgcgctgttccccagggatggctgcaagagtgagcaagacagctccagccagagcctggtgtcagagcctgcaatccagtgggatccctgggggcccagcctggctgcggagtgggggcgttaacaggaaccgggggctactatggacgccctgtgtgccacgtggagcctttggcc[144 bp omitted]tactaaaaaaaaaaaattagccaggagtgatggcaggtgcctgtagtcccagctactcaggaggctgaagcaggagaatggcgttaacccgggaggcggagcttgcagtgagccgagatcgcaccactgcactccagcctgggtgacagacagagactccgtctcaaaaaaaaaaaaaaaaaagaaataggttggtgcaaaagcaattgtggttttttgtttgttgtttgtttgtttttgagtctcactctgttgcccaggctggagtgcagtggcacaatctcatctcactgcaacctctgcctcccaggttcaagcgattctcctgcctcaccctcccaagtagctgagattacaggtgcccactaccatgtctggctaatttttgtatttgtaatag[138 bp omitted]agtcttgctctgtcacccagactgaagtgcagtggcacaatctcggctcattgtaacttccgcctcccaggttcaagcgattctcctgcctcagcctcccaagtagctgggactattcagcgagtgccaccatgcctggctaatttttgtatttttagtagagacagggtttcaccatgttggccaggctggtctggaactcctgacctcgtgatccgtctgcctcggccttccaaagtgctgggattataggcgtgagccaccgtgcccggcctgcaattggggttttaatggcagaaaccgcaattacttttgcaccaccctaatataaagacacaattattatccccattttccagataaagaacctttggctgggagaggtgtacctggaagagtcgtgttttggttttgaactcaggtgtgattgccccccaggtcagtagggggcactattgtgtaagggtggagaggaggggcagcggttaggtggttcagggtgcacagctcaaagctgcctggggccattctaggcacagaggcaggggccagggccggctttaaggccagctcctcgtgcagtctgaggagtggatcagaagggaccagcacctggtgagtgctctacttgaaccatcttgaaactggaaccaaggggaccacatttttgttttatgctgagtgtgtcctgccatgggcttttcctttcccttccccttctccttcccctcccccttccccttcccctctcctcttctcttctcttccgttttttggagacggagtcttgctctgtcgcccaggctggagttcaatagcgcaatctcggcttactgcaacctccgcctcctgggttcgagtgattctcctgcctcagcctcccgagtagctgggattacaggtgcgcactaccacgtccggctaatttttgtatttctagtagagacggggtttcacca[138 bp omitted]ttttttttttttttgagacagggtcacactctgtcgcccaggctggagcacagtggcgcgatctcggctcactgaaacctctgcctcccaggttcaagcgattctcctgcctcagcctcctgagtatctaggattacaggcacaggccaccaggcccagcgaatttttgcaccatagagatggtgtttcgtcatgttggccaggctggtctcgaactcctgacctcagatgatctgctcgccttggcctcccaaagtgctgggattacaggcatgagccaccgcgcccggccttgccaggggctttctactgcactatagtgtggacttcaggacattgtagctgtcctgggggagcccaggtgacagtctaagggggttctaatagagccctggggacatgacagcaggatcccagggggagagagggtgtagtcagggctcattagaacagagccctgaggatctgatgcaagtcaaccagctgatgctataaatgggctccagagacattgcaggaacccagggcatctgcaagggtttcccaggtggcactaagggaccttgaggcctttttctttttctttttctttttctttagggtctcgctcagtcatccaggttggagtgctgtgatgcaatcatggctcactgcaacgttgactgagacctttttcttccgtgacaggaaggagggctatgatggggaatgtctaggcagacccctgggaggcctcctggttaaagccccaggccattacaacagcaaggagaggagatcagaatggggcaaggaaagacactccagatgaccacggccagctgaatcatggcctcagagacgtccatgccctaatcccccaaaacctctggctgtggccttatatgggaaaagggactttgtgatgtgattaggttaggttcagatggggagacgatctcggattatccaagtagccctaaacataatcacaggactcctttggagagggaggcaggcgggttggtgtcggagagagaagacgtgaggaccgacatatgggtcagagaggggagaggatgccgtgctgctggccttgaagatggaggactgggccatgagccaaggaatgctggtagcttctagaagctgggaaaggcaaaaacaccgattcttccctggagcctcc[141 bp omitted]caaaaattagccgggtgtggtggcgggtgcctgtaatcccagctactcaggaggctgaggcaggagaatctcttgaacccgggaggcggaggttgcagtgagccgagttcgcaccagtgcactccaagctgggcaacagagccagactccatctaaaaaaaaaaaaaaaaaggaacacaaaacctgtgagtatcataggtggtccaaggagctttacgaatgtcctggtaatgttacagcagggccctgggggtggggacgtgagagctaaggctgggttatagaggaccccacagtgatggtagtcagacttccaggaaaagcatagcaggctcctgagggacactgtaacagggcattgaggattctgtcagggtccaaggaaccttaaaatggggcccaggggctgctggaatagtgtcctgaagacattacatgatcccaaggaaactagaggggacagctaaggacagggcagttgcctcagggtattttggggaagagctgagggtgctgtaattaggattcttaagaaattaaagcaggtggccaggc[138 bp omitted]tggcaggctcacgtagtcccagttactcgggaggctgaggcaggagaatggcgtgaacctgggaggcgcagcttgcagtgagccgagactgcaccactgccctccagcctgggcgacagagcaagactctgtctcaaaaaataaaaaaaagaaaagaaaagaagaaaagaagaagttaaagcaggttctttctgtctcttaggagtggaccttgggatgggtgtcactggatctcccttctagtaggacacagggagaatcaggtaggacacagtaggacacaggcagaatgagaaaaatgaagacattctggacaaggagaacagagatttacctggttaattttatgtgtcaatttggctgagccacagtgagtgaagagatattcggtcaacattattctggatgtctctatgagggtgttttaggatgagatttacatatatatttgtgagacagggtcttgctgctgcccaggctggagtgcagtggcgccatcacggctcactgcagcctccaactcttgggctcaaggggtcccccagcttcagcctcttgagtagctgggaccacaagtgcgcaccaccacacccggctaatattttaattttttgtagagataagctctctctgttactcaggctggtccttgaactcaagcgatcctcctgccttggcctaccaaagtgctgggattacaggcatgagccactgtgcccagctgagatttatgtttagattgttaggctttgagtaaaggaggttccccttcctgaattgagggaggctcatccaaccacttgaaaccctgaatagaagaaaagtctcggctgggtgcggtggctcacgcctataatcccagcactttggaaggctgaggcgggcagatcacgaggtcaagagatcgaggccatcctggccaacatggtgaaatccccgtctctactaaaaatacaaaaattaaccgggtgtggtggcaggtgcctgtaatcccagctacttgggaggctgaggcaggagaatcgcttgaacccgggaggcggaggttgcagtgagccaagatcgggccattgcgctccagcctgatggcagagcgagactgcgtctcaaaaaaaaaaaaaagaagaaaagtctgcccagagggagagggagtcctgctaggcaattgtgtctcccacctgctggctcccccattagactttggggtttctttctttctttctttcttttttttgagatggagtcttgctctgtcgcccaggctggagggcagtggcgggatctcagctcactgcaagctccgcctcccgggttcacgccattctcttgcctcagcctcctgagtaactgggactacaggcgcctgccaccatgcctcgctaatttttttatatttttagtagggatggggtttcaccatgacctcgtgatctgcccgccttggcctcccaaagtgctgggattacaggcttgagccaccgcgtccaacatttttgaaattttttttaaaaatagagacagggtctccctatgttggccaggttggtctcaaactcctggactcaagcgatcctcccaacttggcctcccaaagtgctgggatgacaggcatgcaccaccacacctggcccccgcatcagactctgaaccagctgaacgtccactaatcctggaagccaattcctcaaatgaatctctttctgtgtatgcatatacacattctgtggattctgtttctctagagaacctgaactacctgaccagcagttccactcccagatgtatgctcaatagagctgaaaacaggccaggcatgggtgtcttgcacctgtcatcccagtgctttgggaggccaaggtgggaggctgtcttgagcccagcagtttgagaccagcctgggaaacatagcaagacactatctctgcaaaaatacaaaaattagctgggcctggtggcaagtgtgtgtaattccagctccttgagaggctaaggcaggtggagtgcttgagcttgggaggttgaggctgcagtgagccatgatcgctccacggcattctagcttgagtgacagagccagaccctgtcaaaaaaaaggaaaggaaggaaggaaggaaggaaggaaggaaggaaggaaggaaggaaggaaggaggcaaggaaggaaggaggcaaggaaggaaggaaggaaggaggcaaggaaggaaggaaggaaagacttcatattatatgattcaatttctttgaaatgtgcagaataggcaaatctatcaagacagaaagcagatgaatggttgccaggggtctgggagcagcggctgtttaacggggacagaccttctgtttggggtgataaaaaagctctggaactcggatagaggtgacagttgcacagcactgtaaatgtgttaaatgacagtaagggtaaatattttgaatattttaccacaatgaaataagtgtatgggaagctttgtagcaggagtgtgggcgggggctggtgcctggaggggccttcgagtgaggcagcattgtatggggaccatgtggtcactgaagtcctagcagaaggatgtggtttttttttttttttgagacggagtctcgctctgttgccagtctggagtgcagtggtgcaatctcggctcactgcgacctccacctcccgggttcaagcaattctcctgtctcagcctcccgagtagctgggaccacaggcccaccaccacgctcagctaatttttgtattattagtagagacgggggtgtcacc[133 bp omitted]tttaaggggatgccgggggaagggcttgaaggaggaactaaggaggcttccagaagattttgattaacagcgagcgctagggaaggccacggggatacagaggggtaggaggaggatccagagacctccaagttgtggactccggaggcatcgagttcctttcccagttttgtcaagaattccctgagcggcagacaccctcaaagtaaaaaacgggaaccacagagaaggaaaaagaagaaccacaagcgttttgagaaacaaacaggctgggcctagggcctggggtgtgccctgcaactggggggtggggctggatgttcttggagtcagggagcagcagcctcccacaggatgtgagagaggaactggggtctccagtcacgggagccaggagccggccagggccgcaggcaggaagggagcgaggctgaagggaacgtgagccgaccagggcccgactgagggaggaggggctgggggcctggaaccctgggtctgagggaggagtggctgggggtctcgacactgggtctgagggaggaggggtgggggcctggattcctgggtctgagagaggagggactgggggtctggacgctgggtctgagggaggagggaggaggggccgggggggcctggactcctgggtccgagggaggaggggttgggggcccggactcctgggtccgagggtagagcggttgggggcccggactcctgggtccgagggtagagcggttgggggcccggactcctgggtccgagggaagagcggttgggggcctggactccggggtctgagggaggaggggctggggcctgaggggggcggaaggggcgtggcggagctcggggccgggactctcagcctatcaagtgtctgtaattaattaaccaactgagatccagttcaggggtgaaagttcttcaggtacgaggagggcattgttgtcagtctggaccgagcccgcagagcccctcctcggcgtcctggtcccggccgtgcccgcggtgtcccgggaggaaggggcgggccgggggtcgggaggagtcacgtgccccctcccgccccaggtcgtcctctcagcatgggggtcccgcggcctcagccctgggcgctggggctcctgctctttctccttcctgggagcctgggcgcaggtgagggccgctccgggccagggccctgctgcaggcgggcggcgggaggcggccccaggcaggcaggggcgaagccagcgggacccgagttccccgcgagcccctggcgctgccttctccgctcaattaactttctcaacgtctcctgctgggcctgaggctgggaaccacctgtcgcctcttgtgtctgtttccctctctctctctgggtctctgtccccctctctttctgggtctcttgtctctctctctctgggtctctgtccccccccccccgggtttctgtcccctctctctgaatctgtccccctccctccataatagattcttctccctccctgggtatctgtcccactgcagtctagttccccgcccgtgtgctcccttcagctctgtttctgtctgcagaaagccacctctccctcctgtaccaccttaccgcggtgtcctcgcctgccccggggactcctgccttctgggtgtccggctggctgggcccgcagcagtacctgagctacaatagcctgcggggcgaggcggagccctgtggagcttgggtctgggaaaaccaggtgtcctggtattgggagaaagagaccacagatctgaggatcaaggagaagctctttctggaagctttcaaagctttggggggaaaaggtgagattccggtctggaggggcaaggggccgggtccatgctccggggccccgcttacctgtgtttgggcgccccaggtccctacactctgcagggcctgctgggctgtgaactgggccctgacaacacctcggtgcccaccgccaagttcgccctgaacggcgaggagttcatgaatttcgacctcaagcagggcacctggggtggggactggcccgaggccctggctatcagtcagcggtggcagcagcaggacaaggcggccaacaaggagctcaccttcctgctattctcctgcccgcaccgcctgcgggagcacctggagaggggccgcggaaacctggagtggaagggtgagccggatctgcagccgcaggctgttctgtcctctctcccgtcatgcccacctgcctcagttcccctgccaggaccctccatcagcctcccactgcagcccacgctctgcccccccattcctcaggggtccttctacactcagccctcccatggctccccagcgccccccaggacaaactcctggcttccttccttgccttctttttttttttttttttgtgagacggagtttcgctcttgttgcccaggctggagtgtaatggcgcgatctcggctcaccacaacctccgcctcccgggttcaagtgatctcctgcctcagcctcccgagtggctgggattacaggcatgcaccaccatgcccggctaattttgtatttttagtagagacggggtttcttcatgttggtcaggctggtctcaaacccctgacctcaggtgatccgcccacctcagcctcccaaagtgctgggattacaggcatgagctactgctcctggctccccccttttttttttttttgagacagattctcgctctgtcaccccaggctggaatgtggtggcaccatctcggctcactgcagcctgaacctcccaggctcaagcagtcctcccacctcagccaaccaagtagctgggaccacagcccagcatcatcacacctggctaactttatattttgtagacacggtgtctcactatgttgcccaggctggtcttgaactcctaggctccagcgattctcctgctttggtctcctgagtagctgagattacaggtgcataccaccataactggctaatttttttttttccgcacaatctctgttgcccaggctagtgtgaagcagggtgatctcagctcgctgcaacctccgcctcctgggtttaagggattccgctgcttcagcctcatgagtagctggcactataggcacatccaccatgtctggctaatttttatacttttagtagagatggggtttcgtcatggtagctaggctggtctcaaactcttgacctcaagtgatccacccacctccgcctcccaaagtgctgggattacaggagtgagctaccgcgtctggccatacctggctaatttttaaaatttgttgtagaggtggcatctcactatgctgcccaggccagactcaaactcctggcctcaagtgattctctcactttggcctcccagggtgctgggatgacaggtgtgagccactgtgcttggccttccttgccttaatgtcctcatcagacccacgcagcagcacttgtctctacgcagccatcagagtctacgctccagccacccaacataagcaatctcctccctctgggcatttgctcatccagtttcccctggcacctctctgttccacccttccccctctctgcatatactccagccctccttattcttcaaggtcagggctggatatcacttcctctgagaagcctttcctcagctctgtagggcagagttcactgtttcctccccggaggcccccagatccccactcattcaactgttggccaagagcatttgcactgccaggcgctgctctgggccttgagcaaagagggaagtgacacacattcaccctctgtggctcccaggctgctggacaaagatagataccagctggggatgtgcacagatattcattccaagtgccacaaaggagaagttgagactcaaccaggtagtttttctttaattgtcttctttctttcctaagtagggaaaatttctttctttttttgagacagagtttcgctcttgtcgcccaggctggagtgcaatggcgcgatctcggctcactgcaacctccgcctcccaggttcaagtgattctcctgcctcagcctcccgagtagctgggactacaggcgtgcaccaccacgcctggctaatttttgtttgtttttttttttttagtaaagacagggttttaccatgttggccgggatggtctcgatcttttgacctcgtgatctgcctgcctcggcctcccaaagtgctggaattacagacgtgagccactgctcctggcctttgttgttgttgttgttgtttttgagacagactcttgcactgtcgcccagactgcagtactgtggcgcaatcttggctcactgcaacctccgcctcccaggttcaagcaattctcctacctcagcctcccgagtagctgggattacaggcacacaccaccatgcctggctaatttttgtatttttagtagagacgggggcttcaccatgctggccaggctggtctcgaactcctgatctcgtgatctgcctaccttggcctcccaaagtgctgggattacaggcatgagccaccactcctggcttaaggagggaaagtttcaaaccacacttaagtagaaacaatagtataaaacggaccagacacggtggctcacgcctataatcccagaactttgggaggccgaggcaggtggattgcttgatcccaggagttcaagaccagcctgggcaacatagtaagaccgcatctctactaaaaactcaaaaaattagcctggcatggtggtatgtgcctctagtcccagccactggggaggctatggcaggaggatcgcttgagctcaggagtttgaggctgtagtgaactgattgcaactctgcactccagcccagatgacagagccagaccctgtctcaaaaagaaaaaaaatatggtggccaggtgcagtggctcacgcctgtaattccaacactttgggaggccgaggtgggcagatcacttaaggtcaggagtttgagataagcctggccaacagagtgaaaccccatctctactaaacatacaaaaattagccgggtgcggtggtgggtgcttgtaattccagctattcgggaggctgaggcaggagaatcacttgatcccgggaagcagaggttgcagtgagccgagatcaagccactgcactccagcctgggcaacaaagcaagactctgtctcaaagaaagaaggaaagaaagagagaggagagggagagagaaagaggaaggaaaggaaggaaggaaggaaggaagcgagcatcccatcactgagacttaataattatcaacccatggttttttgaatttcacgcacatcctcactcacttccccaccccacttcacatcaagctttggtaaatctcagacatcacagtgtttttttctttgtttgtttgtattttgagatggagtctcactctgtcatgcgggagtgtagtggctcagtctcggctcactgcaagcttcgcctcccaggttcaaacaattctcctgcctcagcctcctgagtagctgggattacaggtgcccgccacctcgcccagccaatttttgtatttttagtagagatgaggtttcaccatattggccaggctggtcttgaactcctgacctcgtgatccacccaccttggcctcccaaagtgctgggattacaggcataagccaccgcgcctggccaatttttgtatttttagtagagacgggatttcactatgttggccaggctggtctcgaaccctccacctcaagtgatctgccctcctcagcctcccaaagtgcgggagtcaccgtgcccagccagactgttttgttgataagtcctttagtatgtaactctactaggtaagggcatttaaaaaaaattaataccaaaaccatcatcacacctacaaccaattaactctttaatggcatcagatgtccagtttttgttcccatattcctgactgtaaatgttttttaaagtttgaatcagcatccagcaaggtccacacattttgttgtcttttcagtgtctttttctgattgttgaatttttctttctttctttttttttttttttttcctttttgagacagggtcttgctctgtcaccagactggagtccagtggtgcaatcatagctcactgcagtctgaacttcctgggctcaagtaattctcccacttcagcctccccagtaggtaggaccacaggtgcacgccatcaggcctagctatttttgtttgtttgttttttgagacaaagtcttactctgtcgcccagactggagtgcagaggcacgaactcggctcactgcaacttctgcctcccgggttcaagcaattctcctgcctcagcgtcccaagtagctgggattacaggcgcaagccaccacgccctgctaattttttgtatctttagtagagacagagtttca[144 bp omitted]ctgtcacccaggctggggtgcagtggcgcgatctcagctcattgcaacctccacctcccaagttgcaccaattctcctgcctcagcctcccgagtggctgggactacaggcgcccaccaccacgcccggctaattttttgtatttttagtagagacagagtttcactgtgttaggcaggatggtctcgatctcctgacctcctgatccgcctgcctcagcctcccaaagtactgggattacaggcttgagccaccgcgcccggccggattccaattttttaccagataggtgttttgcaaatatttcttccactctctaggttgtcttttcattgttttaactgtgcctttcacaaagcaaaagtttttaactttgatgaaatccagtttattcttttttttttttctatcgtggattatgcttttggtgtttaatctcagaagtaatcaccaaacccaaagtcagctagatcttctcctgtgtattttaagagttttaaagttttgcattttacagttaggtctgtgattcattttcaggtaatttgagttacttgtgatcttgagtgtcttttgatttacaggtttcccattttctttttgttttttttccccctgtaattgtggtttgaagaaagtcagtttatgtcctattgagtttctcctagactggattttgccctttgcatcctgtgatgttgctggaaatagtcctccttctcttctttaaaggagcagctccatctagaagcttggtcagattctggttcaatttttatggcaagaaaactttctgggtagttggtgcgtatgtctgtgtgcataggctgcaaacatctgcttgcttctgtgctgttctgtggaccactggattcgggtgttgttatgaagttctttgtcaggttttctcctgatggttttagcggatagcaatggccattgccttaatcttttttttttttttttttttttgagatggagtcttgctctgtcgcccaggctggagtgcagtgttgcgatcttggctcactgcaacctccgcctcccaggttcaagcgattctgctgcctcagcctcctgagtagctgggattacaggtgcgtgccaccatgcctggctaatttttgtattttttttggagagatggggtt[145 bp omitted]aggctggagtgcagtagcacgatctcggctcactgcaacctccacctcccaggttcaagtgatcctcctgcctcagcctccttagtagctggaattacaggcacacaccaccacacccagctaatttttgtatttttagtacagacagggtttcaccatgttggccaggatggattttttttttttttttgagatggagtttcactcttattgcgcaggctggagtacaatggcatgatctcagctcactgcaacctccgcctcctggattcaagtgatcctcctgcctcagcctccagggtagctgggactacaggcatgcgctgccatgcctagctaatttttatatgtttagtagagatggagtttcaccatgttggcgaagctggtcttgaactcctgacatcaggtgatctgcctgcctcagcctcccaaagtgctggggttacagacgtgagccaccatgcctgacctggtttggtattttgttaaacagaaccaaaggccagacagattttctgtgcttggatttagtctatattggaagtaccttgaggctgaaggcacgtggctgtgagcacgacacaggaagatacagatttgctgaaaagaatagtgaacataaagcagaagccagaactgctgatggccgtcagcccggtccctccattccacctgacggtgcagcaaattctgccgacttgccagagaggcagctccaggagggagaagctgctgtgctttcctgaagcagcaaatgtgttttctgctgagcaaccaaaaccaagatcccagccaagacccacgattgcccagatccaccctccctgaaaggaacttgggcagtaatgcccagtcctaggcagttgctgaaatctttgccttttattttcttttttgagctgggatcttgctctgtcgcccagactggagtggagtgcagtggcacagtcatagcgccatgtagccttggactcccaagctcaagagatcctcccgcctcagccttacaagtagctgggactataggtacacgtcaccatgcctggctaacattttctattttttgtagagatggggta[132 bp omitted]tggtgaaaccctgtttctactaaaaatagaaaaattagctgggcgtggtggtgtgcgcctgtaatcccagctactctggaggctgaggcaggagaatcgcttgaccccaggaggcggaggttgcagtgacccaagattgtgccactgtactccagcctgggcgacagagactccgtctcaaaaaaaaaaaaaaaaaaaggaaaagaaagcctgggcgtaaggatccttctgccttgacctcccaagtgctggaattgcaggcatgagccattgcacccggcttttttttttttttttctttgagacaggcacttgcactgttgcctagactggagtgcagtagcgggattagagttcactgcagcctcaacctcccaagctcaagcgatcctcccaccttacccttcctgaatggatggggccacaggtgtgtaccatcacacgtagttaatttttaaactttttcagagacggggtttctccatgttgcccaggctggtcttgaactcccggcttccagtgatcctcctgcctcagcttcccaaagtgctgggattacaggcatgaaccactgcacccaaccttttttcattcccttaacgaaacctttggatgaacaaaaattcttaatttcagtgaagttcagtttatcgacttcaatttatacattttataaagtttatgaatttttttttttttttttagacggagtcttgctctgtcgcccaggctggagtgcagtggctatacccaggtgtgatcataactcactccagcctcaaactcctgggctcaaggattcctcctgcctcagtctccagagtaggtgggaccacaggcacatccaccacactggctaattttttttatttgtagtggagactacgtcttactgtttgcccaggctggtctccaactcctgggttcaagtgatccacctcattctcccaaagcgctgggattgtaggagtgagccactgcacccagcctgtctgctaatattatgtttaagagttctgaatctttttttaaattttttaaaatttttaattttttattttttttgagacagtcttgctctgtcgcccaggctggagtgcaatggtgcaatcttggctcaatgcaacctccgccttctgggttcaagcgattctcctgccttagcctcctgagtagctgggattacaggtacacgccaccatgcctggctaatttttttgtatttttagtagagatgggatttcaccatgttggtcaggctggtctcgacctcctgacctcgtgatcctcctgcctccaccccccaaagcgccaggattctaggtgtgagccaccacacctgtcctgaatctatatttatgagagacattggccttaagctctctttttttttttttttttttttttttgagatggagtctcgctctgtcacccaggctggagtgcagtggcgcaatctcggctcactgcaagctccgcctcccgggttcacgccattctcctgcctcagcctcccaagtggctgggactacaggcgccggccaccacgcccggctaattttttgtatttttagtagagatggggtt[145 bp omitted]tgacctcataaaatatgctgggagagtgtttcctctgttttatggcctgaagagttagtgtaggaatagaatcatttctacattggaagaattcactaattgatgtcttctggacctggaattttagtttttggaaagttttaaactatggattaaaaattttaaataggccgggtgtggtgcatcatgcctgtaatcccagcactttgggaggctgaggcaggtagatcacaatgtcaggaatttgagaccagcctggccaatatggtgaaacaccgtctctactaaaaataaaaaaattacccggcatggtggtgcatgcacctgtagtcccagccactcgggaggctgtggaagaagaaactcttgaacccaggaagtgggggttgcagtgagtcgagatcgtgccactgcactccagcctgggtgacagagcgagactcttatctcaaaaacaaaaggctaggcgtggtggctcacacctgtaatcccaacactttgggaggcc[134 bp omitted]gaggcaggagaatggcgtgaacccaggaggcggagcttgcagtgagccgagatcgcgccactgcactccagcctgggagacagagcaagattccatctcaaaaaaaaaaaaaaaatttaaatagttataggactacagacgttttaaatttcctcttgtgtcagtttagaaggttgtatttatcaggaatgtgttcagttcatctaaattttcaaatgtgttgctgtggaatttttcataattatcctctatctttttttttttttctttttttctgagacggggtctcactctgtcgcccaggctggagtgcagtggcacgatcctggctcactgcaacatctgcctcccaggttcaagcaattctcctgcctcagcctcctgagtagctgggactacaggtgcccggctaatttttgtatttttagtagagatggggtttcaccatgttggccagtgtggtctcgaactcctgacctcaggtgatccacccactttggcctcccaaagtgttgcgattacaggcgtgagccaacatgcccagcccaaggaggtgacatcttgaggggacaccttcggggtggacaggttgagtctctgtcacctaggaagtgcctccccttttaccactgtattatctgcggttagcacagtgcaaacatggaggcctctttctgtccctatccagccctggctctgggagtggtgggctcgcgacttaggcctgtctgcctgatttcctgcagagcccccctccatgcgcctgaaggcccgacccagcagccctggcttttccgtgcttacctgcagcgccttctccttctaccctccggagctgcaacttcggttcctgcggaatgggctggccgctggcaccggccagggtgacttcggccccaacagtgacggatccttccacgcctcgtcgtcactaacagtcaaaagtggcgatgagcaccactactgctgcattgtgcagcacgcggggctggcgcagcccctcagggtggagctgggtgaggtcccgccaggtggtgatgctcctggtttcccgttgccttgtctcactgctgcgccggtccttcctgagtctgaccttcctccccactgctgccacctccttgaatctgactgccttgaacctcacgcctgtcagtgcccccaaaacctgatggcttgtccttcccaaggccaactgccttccgtctcctgctgcttctggcctcactgagtctgaagagctgttaactaccatggccagtcctccctgagtctgaccatcttccatcctgctgctgctgctgctgctgctgcgggtcttcctggaatctgaccattcgttgtctgctatgcccgtcctcaccaagactgactgcctgctgctttgctactgcccgggcccatgagactgacttcccactgctctgcctgcctctccccactgcactggcacagccccgccttgccgctgctgatccattgccggtgtgaccgcggccgctcgtgctgtagctggttcttacgtccaacctgggggcagtctgcccagatcgcctgcctggcctcgcctctgcccatcagacacttggtgctggaatctccgaggctgggagggactgggagcgccccagttctgtgtcctgactgggtggggtggaggggctgctccacatctcacagcgttctctggctgcagaatctccagccaagtcctccgtgctcgtggtgggaatcgtcatcggtgtcttgctactcacggcagcggctgtaggaggagctctgttgtggagaaggatgaggagtgggctgccaggtggggggcagcgggaggaagagcctctgagagagggacagagaccccaagagaggggcacacagacctgggaggacagagacccagagaggggggacagagatcagagagaggtggagacagaaacccagagatgggagaacagaggtgcagagagagggggacggagacagagacccagagacgggggaacagagacccagaggggacagagagaggtgcggacagagggagggggagacagacccagaggagggaggcaaagatgtagaaagaggggggacggaaaattgggagaaggggagacaaaggcccagaaggaaggggatagagactgaggaagagtgtgtgagacacacacacaaatgggggacgccagtcagacccagagcgcctcagagattctgatgacctctccctctctctctctcctcagccccttggatctcccttcgtggagacgacaccggggtcctcctgcccaccccaggggaggcccaggatgctgatttgaaggatgtaaatgtgattccagccaccgcctgaccatccgccattccgactgctaaaagcgaatgtagtcaggcccctttcatgctgtgagacctcctggaacactggcatctctgagcctccagaaggggttctgggcctagttgtcctccctctggagccccgtcctgtggtctgcctcagtttcccctcctaatacatatggctgttttccacctcgataatataacacgagtttgggcccgaatcagtgtgttctcatcatttttcaggcaggggaggtaagggaataagtcgggggactgaatggcggctgggcctcggatctctcctacaggtaacatgctgccacaggggaacctgccagttttatacatcaggtcatgtattttctttttctttttcttttttctttttttttagacggagtcttgctctgttgctcagtccggagtcctgtggcgcgatctcggctcactgtaagctccgcctccctgggttcacgccattctcctgcctcaggctcccgagtagctgggactacaggcgcctgccac[131 bp omitted]caccgcgcccggcctaaggtcactttttttttttttttttaagacagagttttgctcttgttgctcagactggagtacaattgcgtgatctcagctcactgcaacctccgcctcccaggttcaagcaattctcctgcctcccaagtagctgggattacaggcatgcaccaccacacccggctaattttttgtatttagtagagacggggtttcaccatgttggtcaggctggtctggaactcctgacctcaggtgatccacctgcctcagcttcccaaagttctgggattacaggcattgagctactgtgctcaacctgaggtcatgtatttttaattcataacttttacaaatatttactggatgactgccatgccaggcattttgaggaattcttggctactgtctgaccacctgaatccttggagccgaagaggagcgaggagcagtgttcactcttggaggaaatgggatatttcctccggccccttgattctgctctcccttttcttttcttttcttttctttctttttttttttgagacggagtttcgctcttgttgcccaggctggaatgcaatggtgcgatctcggctcaccacaacctccgcctcccaggttcaagcaattctcctgcctcagcctcccaaagtagctgggattaaagacatgcgccaccacacccggctaattttgtatgtttagtagagatggggtttctccgtgttgatcaggctggtctcgaactcccgacctcaggcgatccgcccgcctcggcctcccaaagttctgggattacaggcgtgagccaccgcgcccggccttttttcttttctttcgttctttttgtttatttttgttttgttttgttttgtttggtatagaagtgttggaacgtacacctctttcttaaaccatcctgacaaagggaaagggaaaaatacatttcccgtgaggcgttgtgactagaacagctggaggtggacggcagagtgccgcgacgactgccaggagttgtagttctccccggccgcgtcactgcggtgtcgcccacccttcttccccgggcaggccgcggtttcctttgtggacgtggcgaggagtgcccgcggcaccccgtgcactcattggccccgccccgtgagacgctcgtgcgagctcattgggcggggggcggggctctgcgctgccagaggcggggcctgactggagagcggccgaattgggcacatttgcgggaacgcagagcggagcgtggagagcggagcgaagctggataacagggtaaagggagtgggtggggggcctctgtccagggagggcggctcgggtcgaggaccagggtccggactgggagcaatgacggggagcctgcctgacctctcgctggccacaactatgccctgcaccttgcgtgggatgtgcgccacgtctgtctctgtaattccccctggcaggtctgggacccccctgagactccgtcagaagattcggtcctccccataggtggctttacctctaagcatcccgccctcttttcccccatcgcccgccctttttgagcccgaaagcttgcagccaacttccaactccctgtcctgtcctaggtaacccctccaccccgccattctcctatcccgtgtctgtccccatccctgtgacccctgacccctggcctttgccactccccagggaccgatgatgtggcgaccatcagttctgctgcttctgttgctactgaggcacggggcccaggggaagccatccccagacgcaggccctcatggccaggggagggtgcaccaggcggcccccctgagcgacgctccccatgatgacgcccacgggaacttccagtacgaccatgaggctttcctgggacgggaagtggccaaggaattcgaccaactcaccccagaggaaagccaggcccgtctggggtaagagagacattcggttggggcgtgtccagaggtggggcttaggagagagacgcgggggtatcgacaggggtcagagaaatggcgtggactgaacttcatttctttgtgagaaatgaaattctaccttctatccttgggaaaaagaaattaagttaaaattgaggcctaaagaggacctttgagaccgggcgtggtggctcatgcctgtaatcccagcactttgggaggccaaggcaggccgatcacttgaggtcaggagttcgagaacagcctggccaacatggtgaaatcccgtctctactaaaaatacaaaattaggcaggcgtggtggtgggcacctgtaatcccagctactcgggaggctgaggcaggagaatcgcttgaacctgggaggtggaggttgcagtgagccaaaattgcaccactgccctccagtcagggcgacaaagtgagactccgtctaaaaaacaacaacaacaataaaaaagaggacctttgagggcagcaaaatctgggttagattctgccccctaagcgctccttattcttttgtcccagacatctcccctccccaagcctcagtttcctgctctgtaaatggcagggactggtgtggaaaatgaggtttggcctttaaggagcccggccagtgcaggagagtggcagagccctgagtttcagggtgagctgggtggaatggagccctgtccaccctctccgtccaggcctgagcgcaggggggcgcgatgggagcagccgccttcttctgtgcatcctcctgacactgattgagcctgcaaaggtttatcgagcacctgctatgtgccaggcactgctctaggtgctgaagtcacaacagctaacacatctgtcctcctgaagtttacactgtggtgagggaaacagcaagaagtcaataagtagaaagtggatcaaatagagataaatgcatccaagaaagataaagcaagagagtcagaaagtgtggaggggagaggttgttggtgggggggagttgcaatttttatttatttatttatttatttatttacttattgagatggagtctcgctctgtcacccaggctggagtgcagtggtgcgatctcggctcactgcaacctccacctcctgggctcaagcaattgtcctgtctcagcctcccaagtagctgggattacaggcgctagccaccacgcccagctaattttgtatttttattttttatttttatttttgttgttgttgtttttgagatggagtctcgctctgtcacccaggctggagtgcagtgacgtgatctcggctcagtggaacctccgcctcccgggttcaaccagttgttctgcctcgtactccctagtagctagagtcctagctacaagtgaacgctacaagtcctagctacaagtgaacgcctccacatccagcaaagttttttttctttccttttttttttttggagacagagtgagactctgtctcccgggctagagtgcagtggcgtgatctcagctcatgcaacctctgcctcccaggttcaagcaattctcctgcctcagccttccgagtagctgggactatgggtgcacgcccacacgcccagctaatttttttttttttttttgtattttagtagagatggggtttcactgtgttgcccaggctggtctcgagctcctgagctcaggcaatccgcccgccttggcctcccaaagtgctggaattaatgcgtgagccacagcacccagcccaggcccaggtaatttttcttttttttcttttttttttttttttgagacggagttttgctcttgttgcccaggctggagtgcagtggcgcaatctcggctcaccacaacctccgcctcctgggttcaagtgattctcctgcctcagccttccgagtagctgggattacaggcatgcaccaccatgcccggctaattttgtatttttagtagagatggggtttctccatgttggtcaggctggtatcgacctcctgacctcaggtgatctgcccacctcggcctcccgaagtgctgggattataggcatgagccaccgcacccggctggagctgcaattttaaacagggaacttggacaaggcctccatgagaaggtggtatgtggtatttgagccatgtgggtatcggagtgaatagcattccaggcagacagaacagttaagtgcaaaggccctgaggcaggagtgggcttggagtgtcagagcaacagttctgaggcccgtgtggctggaactcagtgagaaaggggagagagtgggaggtgagggcagagaaggagcaaaggggttcagcatggtggttcatgtgtgtgatcccagcactttgggaggccaaggctgggggatcacttgagcccaggagttcaagaccagcctgggcaacatagtgataccccgcctctacaaaacaaatacaaaaattagcccagcatggtggcgtgctcctgtagtcccagatactagggaggctgaggagggaggatcacttgggcctgggaggtcaaggctgcagtgagccaaaatcatgccgctgcactccagcctaagcaacagagcaagactttgtctcaaaaagagagagggccaggtgcagtggctcacgcctgcaatcccagcactttgggagtccaaagcgggcggattgcctgagaccatgcaaagggggtcagatcatgcaatgcaaagccttttaggccacgatgaagatttaggcttttctccaattgagagtagaactgagggagggcatgagctgacttaggttttgagagaatcctgctggctgcgaggtggggaacagactgtagggagcaagaagcagggagcccagtgaggaagcgactgcgatagtccaggtggaagacaagacaagatggtggtcagatcagggtggagacagtggcagtggtccccaggactgctggctgggagattgtgcttggatgggcatgcatgaaggagaaatggaggaagaagggcagtgacaggttagcacatttagcttagcactaatggcaatgccaggcattgtcctaagtgctttattattgttattattattattattttgagacgcagtctcgctctgtctcccagtctggagtgcagtggcgtgatctcggctcactgcaagctccacctcccgggttcatgccattctcctgcctc[132 bp omitted]c[136 bp omitted]gctgcgcctcccaggttcacgccattctcctgcctc[135 bp omitted]gcctccaaagtgttttttgtttgtttgtttgtttttgagacaaggtcttactctgttgcccaggctggagtgcagtggcacgatctcggctcactgcaacctacgcctcctgggttcaagcaattctcctgcctcagcctcccgagtagtggatattacaggcatccaccactgtgcccggctactttttgtatttttagtagagacggtttcacc[141 bp omitted]gcccaggctggagtgcagtggtactatctcggctcactgcaacctccacctcccagattcaaccaattctcccgcgtcagcctccagagtagctgggatttcaggtgcgtgccaccatgccctgctaatttttgtatttttagtagagacaaggtttcaccatgtgg[136 bp omitted]aaccgcccttttggggtaggtaccgttttttcttcctccgttttacagaggggtaactgagacacagagaggttaagtcacttgcccacagtcacacagccagtaagaggaagtggctggatttggacctaaaatgtctggctgtggagcccaagcgcttaacaacaccaggaacctcagagaagggtgtgattccggggacagagtggggccctagacagactggagcagagaccgcctggtgcgggaggtggggcggtgactcaggcaggcctggagagggctctgctgtctcggattttcgactttagggagggggccgcgggggcctagggacggtgacagggaggagggctccaggtagtctctgttaattagagattgggagaggaccggcctggcaaggcgtcaccaagggagaggagaggggcccgagagctgataggcgtggcccaagagaaggggagagatggaacctaaagtggcttgacatgcgacagggaggggcacaggagcccggaggagcatggggaggggcagagggagactgagcccccggggttgcgggtgatggtcctcaggcagtgcctgattcagccgggagcaggcaggggaaagccacggggctcagcacagggcagggctggagggagaggagcctgaaattgacacgcgcagcctggtaagggggaggggcatggggcgggtcggggcctgagacagcgggggatcgggggtgtggccgtggctgtctgggttcagagtcaatcttgcaacagggcccccttggcaagggtcacagtgcgacgccgcgctccccttcaccaccccagctcggcccagcgagaggtgcagcacgtgcaggccgagggcggggccggcgcggagagggtggccctgcatcgtagtaggtccctcccccgcagtgctcccagcaggcccgctcgttctggagaagggcgtgactcgacctgggggtggaccctaggctgaggggtagggtcctccggtgggcttggtcccgaaattgacccgcgcccctccccagttagcccgcggaccgtggactgtattttcagccccggatccgaagtgtcccagggggcgtggcccgtgcgaggggcggggcctgggggcgggaccagagcctgacgtgtgcccgccccggcttctaggcggatcgtggaccgcatggaccgcgcgggggacggcgacggctgggtgtcgctggccgagcttcgcgcgtggatcgcgcacacgcagcagcggcacatacgggactcggtgagcgcggcctgggacacgtacgacacggaccgcgacgggcgtgtgggttgggaggagctgcgcaacgccacctatggccactacgcgcccggtacgcggcgagcccccgaccctgctccccatacaccgtgaccctgaccttctggaccgcctcattctgagaaccctgaacccatttacccggagtccctggcccctaaccaggctctacccacttttaggagcccataactgtgagatcttcagtttctcacctctggcttctcttttttgtttttcgtctgcttatttttctggtatttagctgcatgctaaaaacgatctttttttcaaacatgaagtcacaattaggtgctaaaagccactgaacgcacccaaacagggacttgaaacctgggccctcaaattaaaagtccaatgctctaccaactaagctacccaggttcccttcagggctttcattctgggactcaccacctctgtgacaatatgactagggtacttgagatccctggccaaggacacctactttccatgccttgtcatcctgacccctaacttctgtgacctctcatcctgagaaccccaaagccagttactcagcccctgactctcagatccctcctttctgtcccaagtcccagcctcagtgccccacaccctgccacacacacagccctcattctctccctcctctcctctctgtccctggccccagcctccccgtccagtctgtcctccacagggctccgggggcggggttcttcatgcccagcactgactctgcccctccctccccctcctgggcccccaggagacggtcccactccccagccgggacgtttcctcctgtggctttgtttttctgcattttctgcaccaaatggattttctgtggttttcctgaactcaccacactcttcaaacctctaccttctgcccatattgttccctccagttacaatgcccgtcccctcctctcagtcaagccatctcagtccctgtaagctaccccatcacagccttagtctggggccaaaaggcccactgtcaactcatagtgggccattcctgtctccacacgcttggatcagttatttcttctctctgagaatcaatttttgcattcagaaagtagaatacatggaaaaacccactgtatgtgcttttttgtgatgattaaatgcaatattgtgcataaagagcttagcatataatctctcacaa[140 bp omitted]caaaaccccgtcttaccacaaaaaaatacttagctgggcgtgatggtgtgcacctgtgatcacagctactctggagggtgaggcaagagaatcacttgaacccaggaggcagaagttgcagtgagccgagatcacatcactgcactctggccttggcgacagagtgagactctgtctcaaaaaaaaaaaaatatatatatatatagatagatagatagatagatagatatagatatacacacacatactaataatatgttatataacatattatatacttaaatatatatacaaattatatataaagtatcaatatatgcttttttttttttgtgagggagttttgctcttgttgcccaggctggagtgcagtggcgtggtctcggctcactgcaacctccgcctcccgggttcaagcgattttcctgcctcagcctcccaagtagctgggattacaggcatgcgccaccacgcctggctaattttgtatttttagtagagatggggtttctccatgttggtcaggctggtctcgaactcccaacctcaggtgatctgcccacctcggcctcccaaagtgctgtgattacaggtttgagccaccgcacccggcctacttttttttttttttttttttttttgagatggaatggagtttcactcttgttggccaggctgcagtgcaatggcaaggtctcggcttactacaacctcatcctcctgggttcaagcaattctcctgcctcagcctcacgagtagctaggactacaggcgcccaccaccatgccaggcaaatttttgtatttttagtagagaaggagtttca[131 bp omitted]acatagcctccctctgtcgcccaggctggaaagcagtggtgcagtctcagctcacggcaacctccgcttcctgggttcaatcgactcttgtgcctcagactcccgagtagctgggattacaggcgtgccccaccatgcccggctaagtatttttttggtagagatggggtttcgccatgttggccaggctggtctcaaactcctgacctcaagtgatctgccagcttcagcctcccaaagtgctgctattacaggcgtgagccactgcatccagcctactgatatatacttattaactccacagaaatctttgtaccccagtaggatttactttgtctttgttttaacctgcttggcgtttcctccattaaagctcatctcactgagacctgtccttccccaggtgaagaatttcatgacgtggaggatgcagagacctacaaaaagatgctggctcgggacgagcggcgtttccgggtggccgaccaggatggggactcgatggccactcgagaggagctgacagccttcctgcaccccgaggagttccctcacatgcgggacatcgtgattgctgtgagtggcggctggggaaccctgtcccccacacccttccggggacccaggcttccggttcaggtcctgcttcccagcaccgacctgggggcaggcagtcacctggttctccagcatcttgccggggaagccaggccgcaaacacaggtcagaggacggtgacctttcccacctccactctcagtcccctggggtctgatctctcctcgtctggccttcccctccctgtgctcgcatttggggtccaggcccccagccttccctcagacagccactgtgccccaccttatacaatttcttttctttcttttttttttttgagacatagtctccctcggttgcccaggctggaaagcagtggtgcgatctcagctcactgcaacctccgcctcccgggttcaagcaattctcctgcctcagcgtcccgagtagctgggattacaggggcgcaccaccacacctggctaatttttagtagagacagggtttcttcatgttggttaggctggtctcaaacttttgacctcaggtgatccgcccgcctcagcctcccaaagtgctaggattataggcatgagccaccgtgcccggccaatttttaatttttttttctagtagagatgggatttcaccatgttggccaggctggtcttgaactccggacctcaggtgatctgcccaccttggcctcccaaagtgctgggattacaggcatgagccaccgtgcctggccccaaaatgtgctttgttctatagaagaaggctttttttttctttccttcctcttttttttttttagtttttgagacagggcctaactctgttacccagaccggagggcagtggctcaatctcagctcactgcaacctcaaactcttgggctcaagtaatcctcccacctccgccttctgagaagctgaggccaccaggcacaagccaccatgtctggctaatgtttttttttttttttttttc[132 bp omitted]cgccatgc[142 bp omitted]gccatgcctggctaatttttaaattttgtgtagagacagggt[135 bp omitted]taaattggggaacaaaagtcgttttgctccagaagggcacaaaaacaaggagcggaggtgtccagtgtgtcagaagaagccccaaagtgcaccatgttcacacataaagcagaggtaggttctaggctctgctaaacataaaggagcttctccccttggagggtgtttgctggggcttgagcaagttattagggacccaggacagctccccttgtgagcaacaaacctgtgcactgctggacattagggcctctgggctctggccccgtaaatgcaggtggtgcctgtttgatgataacatcccagaaagcccgcaaatttcccacatgccacctgttgagactgctctactgcctgcctcccacagctgcccggagctaaatttccaagagaacctctcactcttaccccaggggtccagcctcccccaggagccagggtcatcggcccccagcctcaatgcccctttctcctccaggaaaccctggaggacctggacagaaacaaagatggctatgtccaggtggaggagtacatcggtgagtgggccccaatttcttcttgggatgcctgtcctctctcaggcatgggcagggttggtgggggtagccggaggtacatcacccatcatcagagaacagtggccctcagacatgggggcaggggcactcactgcttgagttcatttagccacccaacatttattgagcacctactctataccagacacaaaaagcatctattgagcacctgctgtgtgtcacgcccaggatacacttactgagcacctactgcatatgggtggttgcgcctacagcagacaataacacagacaaatcccttcttgggggtctggagtttctacaaaatcaaggctcaggggctatgtttagttgagaatgggggtcaggaagctggtcttgaacctgcgcctgcacagcaaacactgtttcctgttacatgggatgttgggggatcctcacaataccccctgagttctgagttctccctgggcccctgccactgtc[131 bp omitted]gcaacctccgcctcccgggctcaagagattcttctgcctcagcctcctgagtagctgggattactggtgcctgccaccacgcctggctaatttttgtatttttagtggagatgggatttcaccatgttggccaggctggtctagaactcccaacctcaggtgatctgctcatcttggcctcccaaagtggtgggattacaggcgtgagcaaccacgcccggccaggaatttttttttaagtttgaaaacattgtttattcttttatttttttctgaccacatcctacatgagaaaacatttttctttctttccttctctcactttctttctttctgtcactctttctttctatctgtctgtctgtgtgtgtgtgtgtctctctctttattaaatagagatgggttctcactatattgtccaggctggtctagaactcctgggctcaagcaatcttcccaccttggcctcccaaagagctgagattacaggcatgaatcaccacacctggctgagagaacatttttatatttttttcttaagagatggggttgggccaggcgcagtggctcatacctgtaatcccagcactttgggaggctgagatggatggatcatgaagtcaggagttcgagaccagcctggccaagatggtgtactaaaaatacaaaaattagccgggcctgttggcaggagcctgtaatcccagttactctggggactgaggcaagagaatctctggaacccgggaggcaaaggttgcagtgagctgtaatcgcgccattgcacttcagtctgggcaacaagagcgaaactccatcttaaaaaaaaaaaaaaaagatggggtcttgccctgtcgcccaggctggagtgcagtggggtgatcttggctcactgcagccttgacctcctgggctcaagggatcctcccacctcagcctcccaagtagctgagactccaggcacagtgcggcctctggagatacttctggttgtcacttctagaggggtgaggatgctactgacgtctcctggatagagcccagagatgctccttagcattctccggtgcacaggacaggccc[131 bp omitted]tccgcctcccaggttcaagcaattctcttgtttc[213 bp omitted]ttcatcttccattcctcagctctaccaggcagacactgtcactatcctccattatatagatgacacctgaggcccaggggggttgaagggatctgctgaagacaatgggaagaggcagggctaggatttgaaccttggtgtttgggctctggcacctatttcttaactcctccccaaccagtaacatatcaaaatgtataaaattggggtgggtgccatggctcacgcctgtattcccagcactttaggaggccaaggtgggtggatcacttgaggtcaagagttcaagaccagcctggccaacatgatgaaaccctgtctctactaaaactagaaaaattagctgggcgtggtggcgggtacctgtaatcccagctacttgggaggctgaggcaggagaatcacttgaacccagaaggtgcaggttgcagtgagctgagattgtgtcactgcactccagcctgtaatcccagcactttgggagactgaggcaggtggatcatggggtcaggagtttgagagcagcctggccaagatggtgaaaccccgcctctactaaaaatataaaaattagctgggtgtggtggcacgcacctgtaatcccagctacttgggaggctgaggcaggagaatcgcttgaacctgggaggcagaggttgcagtgagctgagattgcgccattgcactacagcctgggcaacaagagcgaaactccatcttaaaaaaaaaaagggggtggggtcttgccctgttgcccaggctggagtgcagtggggtaatcacagcgagactccatctcaaaaaaaaaaaaaaaaatttgtagaaacagggtcttgctatgttgcccaggttggtcttgaatcttggcctcaaatgaccctcctgcctgggtctcccaaagtgttggattacagtcatcactgcacctggcatctctgtcacctgctaactggccagaaacatcctcgcacgttcctcctgcatagacattgcttactatgtgccaggcactgccttgcccattgcacacactacttcacgtgtgtgtcaatgaaatcaatcaatcatgcaatcaaccaatcaaatgaatttcacctgtaacacaaatgattgcttataagtcaggttttgttactaattccatcgaaacagaagaggacgctgaggcgagagagagggtagtgagttgctcaagggcctggttcaggaagtatcagagccaggatcagcccccagctccactagacccccagagctgcccctgaccttgtcccctctgtcccggcccccagcggatctgtactcagccgagcctggggaggaggagccggcgtgggtgcagacggagaggcagcagttccgggacttccgggatctgaacaaggatgggcacctggatgggagtgaggtgggccactgggtgctgccccctgcccaggaccagcccctggtggaagccaaccacctgctgcacgagagcgacacggacaaggtgcagtgacggggcctcggcaggagcgaggagcgggtgggcattgcgggccagactccagaaaggagcaagacctgggcctggagctcagggtcccttttaggtgggataaaaaaagagggacagagagagggaggaaaagagagggcacggagccccagaaagagagggggacagagacccagagacccaaagagagaaggacagggaccaagacggggacagattcagagagaaagggacagaggcccagagaacaagggtcccagagacttcgggacacgcttggatgcagggagggcttttgaaagcagggccgtgttgtcccctctgaaccctgaccctccctccaggatgggcggctgagcaaagcggaaatcctgggtaattggaacatgtttgtgggcagtcaggccaccaactatggcgaggacctgacccggcaccacgatgagctgtgagcaccgcgcacctgccacagcctcagaggcccgcacaatgaccggaggaggggccgctgtggtctggccccctccctgtccaggccccgcaggaggcagatgcagtcccaggcatcctcctgcccctgggctctcagggaccccctgggtcggcttctgtccctgtcacacccccaaccccagggaggggctgtcatagtcccagaggataagcaatacctatttctgactgagtctcccagcccagacccagggacccttggccccaagctcagctctaagaaccgccccaacccctccagctccaaatctgagcctccaccacatagactgaaactcccctggccccagccctctcctgcctggcctggcctgggacacctcctctctgccaggaggcaataaaagccagcgccgggaccttgtgtgtctgtctgttgtctgcctgtctctatgaagggtaagggggccctggagatggtttgggggctgtgactgggagttgggggctgagacatgcaataggggaccaggcatttgaaggaggggtgctgggtgttggagggattggagggcgttcctcagtataaaacaaacaaacaaaaaaaattgggccaggcccggtggctcacgcctgtaagcccagcaatttgggaggctgaggcgggtagatcacgaggtcgggggtcctagaccagcctggccaacatggtgaaaccccgtctctactagaaatacaaaaattaaccaggcctggtgatgggcacctataatcccagctactctggaggctgaagcagaatcgcttgaacccgggaggtggaggttgtcgtgagccgaaatggcgccactgcactccagcctgggtgacagagggagactctgtctcaaaaaaaaaagggaaaaaaagcctggactctgcagcgcacaaaccagacaggaagccctgccctctcagagctccagttctgtaaggaagagacacagcgacctaaaatatggcacggcgcaacagatgctgtgaagcaggggaagcgtgtagcagtgtggcaatgttctgatgactgagaggctgggaaaggtctcaatggtaaatggagtgaaggagggagccacggagagatctggagggagagcattccagggagagagaagagcaagtaaaatggccctgaggcaggagtgggcctggtgtggcagcatcagcaaggaggctagagtggctggaagggaatgagccagtggaagagggtcagagctgagagcagatggggcaagtggccagactgtgcaggcccctgcaggcaggtcatggtggtccctgtttggtggcacaagacagggatggacagagacccagagagaaggggtggggagtcagagagagagggacagagacccagagagagaggggaacagagacccagagagagagggacagagacccagagagagaggggaacagagacccagagagagaggggaacagagacccagagagagagaggggaacagagacccagagagagggagacagaaactcagagagagggaaacagagacccagagagtgggggacagagatccaaagagaatggggatagagacccagagagacacagaatttattctgagtgacatgagagtcgctggagtgtcatgagcagaggagggattataaactgctttgagttatttaagagtcgggttgggcgcagtggttcacgcctgtaatcccaaggattaatcaaggattgcttgaggccaggagttcaagaccagtctgggatgatct[139 bp omitted]gaccatatctctatttaaaaattagtttatggccgggcacggtggttcacgcctgtaatcccagctctttcagaggccgaggcaggcagatcacgaggtcagtagatcgagaccatcctggctaacacggtgaaaccccgcctctactaaaaaatacaaaaaattagccaggcatggtggcgggcgcctgtagtcccagctactcgggaggctgaggcaggagaatggcctgaacccggga[132 bp omitted]caagaacaggcaaaactaatctgggggttagaactcaggatgttgttcacccttgcgggggagggaccagaatggacctcatgggcttcttatcgggagagggaggctggaaaatagcctattcttgatctaggtactgcttcccaggggtggtcagattatgaaaattcattcagttctcca[131 bp omitted]gcaacctccacctcccaggttcaagcgattctcctgcctcagcctcctgagtagctgggattacaggcatgcaccaccacgcctggctaattttgtatttttagtagagacagggtttctccatgttggtcaggctggtatcgaactcctgacctcaggtgatccacctgcctcagcctcccaaagtgctgggattacaggcttgagccattgtgcctggccgatagctattttttttttttttttttttttttttttttgagatggagtcttgctcttgtcatcctggctggagtgcaatggcatgatcttgactcactgcaacctccacctcccgggctgaagtgattctcctgtctcagcctcccgagtagctgggattactggcatggaccaccacgcccggctaatttttgtatttttattagagacggggtttcaccatgttggccaggctggtctcgaactcccgacctcaggtgatccgccctccccgacctcccaaatttctgggatcacaggcatgagccaccgtgcctggccagttcggtttttttttttaggtttacctgggctttttggagtgtacccatgcagccaggtgtggttcagggtcagctagatatttgagtagagttgggccgtgtgcggtgactcacgcctgtaatcccaacactttgggaggccgaggcaggcggatcatgaggtcaggagatcgagagcatcctggctaacacggtgaaaccccgtctctactaaaaatatttaaaaaattagcctgggcgtggtgttgggggcctgtagtcccagctactcgggaggctgaggcaggagaatggcgtgaacccggtaggcggagtttgcaccactgccctccaacctgggcgacagagggagactccgtctcaaaaaaaaaaaaaaaaaaaaaaaaaaaaaagatacttgagtagagtttatagaaaccattccaggtaccctctctccagcttttcttttccaggatttatctcctcaccttccttttgctgtagttcttcaagctaggaagactggatttccctctggtgttttagctgccagtcatggtatgaactagaactcacccccaagtaaaagctgtacaaataagaaactcgcctttcttttttctgagtgtcaagttccctccagttgctctgtctgcttttgtttaccttccagtgccttgcctttgggtaattgttttccacgttttttccagggtttatagctgttgtctgtgtgggagggctggaatttgaatccaagcgcgtctgactccaagcgttttcgtatgataacatactgccctctagtggctggatgtggagaactggtttatgtgggaggaagggcatattggtaaatctctgagggctgcatgtttggaaacattgtttatcgaaaacaatacccacacatagcaacaaattacttgcacagaacagtttatggtgaaaaactgcctagcatcttgtcacacttactgcttctctccagaatttttttagttttaaaatattcttgcatattttattttaaaataatggccatactctcacaggatacaaaacccgaaatatacaggatgctacaagctaaaaacaacgccttccactaagttcaactcttcacagacagccagtgtttcctaccatggagaatctacacagatttaagcaaatatgtacaaatagtctttatttttttttggaagacgaatctcgatttgtctcccaggctggagtgcagtggtgcaatcttgtctcactgcaacctccgcctcccaggttcaagcgatactcctgcctcagcctcccgagtaactgggataacgggcacgggccaccat[142 bp omitted]caacctcccaagtagctgggactacaagcgcccgccac[138 bp omitted]gcccagccattttttgtattcttaatagagacggagtttcgccatgttggccaggctggtctcgaactcctgatctcaggtgatccggctgcctcggcctcccaagtgctgagattacaggcgtgaaccaccatgtcttgctaatttttgtatttttagcagagagggggtttcaccatgttggtcaggctggtcttgaactcctgacctcgagatctgccctcctcagccccccaaagtgctgggattacaggtgtcacccaccgcttccggccgcgttttttggtttgtttgttttgtgtgtgtgttttttgttttgttttgttttgttttttgagatggagtcttgctgtgtcgcccaggctggagagcagcggctcaatctcagctcactgcaacttccgcctcctgggttcaagagattctcctgcctcagtcttcctagtagttgagattactggtgccggccaccgtggctggctactttttgcgtttttagtagagacagggtttcaccatgttcgccaggctggtctcgaactcctgacctcaggtgatccacccacctcagcctcccaaagtgctgggattacaagtatgagccaccacgcctggccctggcctgcgttttttaagacataatcttgctctgccacctaggccagagtactgtggcactccagttgcagagagccaacattgtgccattgcactccactgatctcagctcactgatctcagccagctgcaagcgattctcgtgcttcagcctccctagtagctgggattacaggcgtgtaacaccacgcccagctaatttttgtatttttaatagagatggagtttcaccatgttgtccaggctggtctcaaactcctaagctcaagcaatcttcctaccccagtcccacaaagtgctgaaatcatgggcaggagccactgcgcccagccattctagctcgtgttttgctgagcatcgtcgcatgtctttggggtacacacacaggagtgaggtagtggagcaccggctaggcgcatttttagcgttaatcgatattgccaattcatttccccagtttacgtgcccaccagcgttgtagacaagttccagtttctccacatcctgaccaacgcttattagaataaacttttgaactgtttttgcttttagttcttccgttggtgacctccccacttgcagatcagcagatcaaatccccatgctgttgacaacacgctgggagcaaagagccaggtggagcttctaacgaagtcagatcttctgatattttaaaagctgagataaaattcacaggccataaaattaacccttggtcgggcgtggtggctacgcctgtaatcctagcacttcaggaggccaaggtgggcagatcacttgaggccaggagttcaagaccagcctggacaacatgacgaaactctatctctattaaaaatacaaaaattagccgggcgtggtggcacatgcctgtaatcccagctactcaggaggctgggacaagagaatcgattgaacccgggaggcggaggttgcagt[131 bp omitted]cccggacagccactaactactttcttttgctatggatttgcctattctgggcatctcattataaatgcaatcgtacgtgtgacctttcgtgctgggcttctttcagcatgttttccagatccatccacactgtagcccgtgtcaggacgtcattgcttttttttttttttttttttttgagatggagtctcactctgttgcccaggctggagtgcagtggcgcgatctcggctcactgcaagctccacttcccgggttcatgccattctcctgcctcagcctgccgagtagctgggactacaggtgcccaccatcacacccggctaattttttgtatttttagtagagatggggtttcaccgtgttagccaagatggtctcgatctcctgacctcatgatctgcccgtctcggcctcccgaagtgctgggattacaggcatgagccactgcgcccggcccaacgtcattcctttttagggctgagtaatattccatggcacgggctagaccacattttgtctccactcatcagctgacgggcttttgggttgtttccacttctgggctatggtgaatggtgctgttagggtcattcatgtgcatttgttttgcctcagcctcccaagtagctgggattaaaggtgtctgccaccacgcctggctaatttttgtatttttggtagagatagggtttcaccatgctggccaggctggtctcgaactcatgacctcgtgatccgcccacctcggcctcccagatcacgtacatatttttgtgtggacctgttttcagtttcttgggtagataactaggaggggaattgtgaagctgatttttccttttatacatgtctcactctgtcacccaggctggaatacagaggtgggatcacagctggacctcctgggctcacaccatcttctggcttcggtctcccatgcagctgggactacaggtgggcaccaccatgcccagctaatgtattcttttttgtagagatggggtcttgctacaatggccaggctggtcgccaactcctgggttcaagcaatcctcctgactcggcctcccaaagtgttgggattacaggcgtgaaccaccttgcttgggctgattttttttttttagatggagtctcgctctgtctccaggctgcaatgcagtggcacgatctcagctcactgcaacctccacctcccaggttcaagcgattctcctgcct[295 bp omitted]gagatcccttccctacttaaaaaatacaaaaattatccaggcacagtggctcacgcctgtaatctcagcactttgggaggccga[134 bp omitted]tgaggcaggagaattgcttgaacccaggaggcagaggttgcagtgagccgaaatcaggccactgcactccagcctgggcgacagggcgagactccgtctcaaaaacaaaaaaagagaaatggaaatctagtttttcacatgaaatctcccagctccttttttgcatttgaaaacttcatacagtaaaatccactccttttggtgaacagttctgaattctgataaaccagagtcatgtaaccaccacagtcaaaatccggaactgttccttcacacccccccagaatctctcttgctactccccactttggggtcaactccttcccctactctggcaacgaaagctttgttcctggttcgtatagttttgcctttgcagtgtcagaataaatcttcctgtttttattttctattgttttgatatggggtctcgctctgtagctcagactggagtgcagtggtgctatcgcagctcactgcagcctccacctcctgggttcaagcgattctcctgcctcagcctcctgagtagctgggattacaggggtgctccaccacacccagctaatttttgtatttttagtagagacagggattcaccatgtggaccaggctggtctccaactcctgacctgaggcaatccacctgctttggcctcccaaagtgctgggattacaggtgtgagctaccaggcccagccatcttcctgtttttaattttttttttgagatggagttttgctcatgctgcccaggctggagtgcagtggtgcgatctcggctcactgcaacctccatctcccgggttcaagcaattctcctgcttcagcctcccaagtagctgggattacaggcctgtgccaccacacccgattaagtttgtatttttttttagtagagatgaggtttcaccgtgttggccaggctggtcccaaatacctgacctcaagtgatccacccaccttggcctcccaaaatgctgggattacaagtgtgagccactgcgcctggcccgttttta[136 bp omitted]ctcctgagtagctgggactacggacgcatgccacgacgcccggctaattttttatattttcagtaaagacagggttttaccctgttagccaggatggtctcaatctcctgacctcatgatctgcccgcctcagcctcccaaagtgttgggattataggtgtgagccaccacgcctggcccgtttttaaatctttacaagtaactgtaattttctggacgcgctgcctgtgagcttcttgaaactggagccctcggcaggcacgcctgccatcagcgccaccaagcccaggtcttgctctaaactttagaccagtgtctaaggaaactctgctcaaaaaagacaagatttgtctcacttcccgtctctttcttctgctacggctgaagctgtggttctgctcttgcttcctctccaagtactttagaaccttaaatgacagaacagggtgaggtgactcaaatgtgtaatcccagcactttgggaatctga[151 bp omitted]cctgtctccactaaaaatacaaaaaagaattagccaggcatggtggtggtcgcctgtagtcccaactactcgggaggctgaggcaggagaatggcgtaaacccgggaggcagagcttgcagtgagccgagatagcgccactgcactccagcctgggcaaaagagcgagactccgtctcaaaaaaaaaaaaaaaaaaaaaaaaaaacccagcctggccaacatggcgaaactacatctctactaaaatactaaaaatacaaaacaaacaaacaaaaaccagctggctgtgctggcagcacctgtagtcccagctacccaggaggctgaggcaggagccaggatcacgcaagtgcactccagcctgggcaatagagcaaggctccatctcaaaacaaaaaaaaaaatgacagaacagattggagccaggactttgacctccccaccctgcactgcacaaagagtctgtgaacagagtggtgtttgagttcctttgggaaaacacaggtgcaagattagaaacccttcaggttattactgggggcaccggtgatctgttcaacatatgaacaagactggggttcttagatggctgagaaagctggaaggactcgggtggttgagaggtcttgagaaagaggacaaggattagggatgtggaaggaaagggtatgacatggaactctgggtatggagggatggggtgggagcttgtggaggtggagaggccagtgggtctctaggggagggaggacatgaaggatgggggaagtccaggacaaagtctgggggcgtctcagaggaaactggctcctgggggaacctggcttccgtcactccctcgagcacgtgtgactttgctcaagttgtgccttctcgatcatgccattgcactccagcctggggagtggaaaagtattactcactgaacaggatggtgcatgcactgtgattcactttggttgaaacctcatgtgtactcacataaagaacaggaaggacagaacctaggtggcattgctctgcgaggcaggaatgctgtgttttttgttgttggtgttgttattgttgttttttgagacagagtctcactttgtcgcccaggctggagtgcagtggcacgatctcagctcactgcaacctccgcctcccgggttcaagcaattctcccgcctcagcctcccgagtagctaggattacaggcgccggccaccacacccggctcatttttgt[265 bp omitted]gcccagcagctgcttttgtgactcaatggttattaaacacaaggccttaaggacagcccctacattcccagtcaagtctgacgccaccgggctggttcctggtccccgctctgccctggctccctcactctcccctgtacgccctctgctccttaaatctgcaaagtgcgttgctgcctctgggcctttgcactcgcggtttcctcttcctttccccctcaggctgccacaggtgggggcgtgatgctcctgaccgcctttcctagtccgggtgctgcgcactttttcacagaactgcacttcctttgtgggtctaatcacactgcagcccggaagacacgttcctgggcatttcctgttcttcaaacctggcaaaaatccgggaaccctaacaaagaactcgagaaatttctatgtagctcattaaagtggcgcactcacacggtcttggcttagacttggacttccggccactcaaccaattttaatgctgtgcatttgcgttctattcaggtttttttttttttttcttctttgagatggagtctcgctctgttgcccaggctgaagtgcaatggtgcgatcttggctcactgcaacctccgcctcctgggttcaagcgattctcctgcctcagcctctggagtagctgggaatacaagtgcgcaccaccatgcccggctaatttttgtatttttagtagagacaaggtttcaccatgttggcca[131 bp omitted]cccgctctttcaaactccagcgtgcgctgtaggagcactgtttgcacggccctgcatcctcgcctgccctgtccccggggcgcccacgccgcgaatgaaggcgccacgtcgttgcgcacccaagccggtttatttggtctcccgcacacactcaggcctgcatcaccggccgtgatttctccgcttgcagcttcactccggagcccgcgaagccggtaccgccctgggggaggtagagagaaggacgaggtagaggccggcccgggggtgaccagtggggctccaggtggtagtggggattcctaagcgggtcaaggtgaagcgggttgctggctaaggagtaggagttggggagggggcgaggcgaccgcagtgggtacggatggacagggcgcagggcgcagagaagagggtagagagtggcaggggaggagccttgggagggagcgtgtggagggggtggagccgtggagggctggaggcagggaaggggcggggccttgaaaaggaaggaggaggcggggcctaggagagcggagggggggaagggcggggccttgcaggagaaagcggggggggggggcggccttacagagcagagaagaaggcggggccttggagagttgggggaaggggaggggacgaagccttggagggggtgaaggggaggggcggggccttggagtgctgggggaaggggaggggtgggactcttacccgctgcagcacgatgatgtcgcggtctgtgagtttgtctccagtcacagggtccaccatgtccttccgaatcagcttctccacgcattcgagggtgaccacagccccactacggtgaggccgaaggcgggagactctgatcaggggccttcctggggacctactggccccaaagccggaccgccccgcaggttcccgagtggtcccttccctcccctcccaggtgactcacgagggccgcagcacagcgcagggggtggcgttgctcaggctgtcgcgggtcacggcacacacgtagcgctcgctgcgggtgatgagccccacgcggtccacggagctgtctagcggtgtgaagtgcacgggcgtcaggtccgacatgcgcaggggcttccctgacatggggcaggtcaccgtgcgggactgcaaggggcagagagaggcgggctcagtaggcagggctggcgcaggtggagagcgcgtggtccctgtgcgtgaggaggacggtggggaaccctggcgccctggcaccgtgcgtgccggggcgctgtgggggctcaccggcttctccagcttggtggccttggcttcgggcgtcagcgacgggatccagaagctgggcagcactttgtccttgtccttacttggaggacccacactgggcccaggttggacatcatctgtgggggaaggaagggactcagatgccgccccctgggcccgcccagcccgcggcgccccgccccccaacccacaagaagcccaacctgagtcacctgggctggtgcccgagagggccttggctgtgaaagggttgaggggccggctcacgatagccgactccttctccaggaagccccgcacatggtcctgcgaggccgcccgctgaagctccttctgctcctcgcgccgggtgccccgctgcttctcgtaggcctgcgtcggggaaagtgggctgagcatctgcccgtggggctgggggtatcttcctcccatttcacaggtaggtaaactgaggcccacaaaggggaccctctgatggaggcactatgtggcagagggtggtaactgccaccctgggtgggtgtgaaccttactgcgttgtatagccagactgccagggctcaaagcccatctctgtcactctgtggcctaagtgagcactatgacctctcctggcctcagtttcttcatctgtaaaacagcctaacagtggttacccacctcagcggctcactgaagggttacataaggtgagtgtttacagcatggagagcctcacctggcactcagctaagcatttaattaatgtcacctgctggccaattaagttttctatacagtgcatgccccagcccgtgtttgggacgggggatgtagacttcagatctaagggaatgctgaggagcccatgtctatggacggacagtgagtgaggacgggagaagtgaagccatgacctgagctcagccctgcctggcgcacagcagttgcctgggcggtgctgcagttccagaccaccctgggccacccagctgagtgaggaggtaacagtgacagtgatggatgctcatgagggcctccgacatgaccaccaggctgtgtggaggacatgggcacagggggagccacctgcttgggacaaaaagcccaataagcatgtgacctgtagtgtttcctgagcgccagcaaccaggcaggggaagagggggacagacccactgtgcctcaaacagggcccctcctacccatcaaatggctttgtccatggaaggccaggccgggttcccagtaacacgccttgagaatgctcatctgcgtgtacctcccaggtgccctgctgtgtcctctgatttggccgtcagcccgttttacagacgatgaaactgaggcccagaaaaaatgaggtgatgtcaattcacgtagcacatctttttttttttttttttttttgaaacagaatctcgctcggttacccaggctgaagtgcagcggtgccatctcagctcactgcgacctctacctcatgggttcaagcgattctcctgcctcagcttcctgagtagctgggattacaggcgcccgccatgcccggctcaatttttttttttatttttttatttttagtacagacagggtttcaccatgttggccaggctggcctctaactgttgacctcaagtgatccgcctgcctcggcctcccaaagtcctgggattacaggtgtgagccaccacccccgacccatttagcatatctttactaaggacctaagctacagggtgggaaaactcgaagtccataagggaaagtgggcatgtgtcagacagccacatgtacagctacaactatgctaagtgctaagagaagaggtgactggggcagatcctggggactggcaggagctcagaggaggcagcatctgggctgaaatcggtgagaaggatttggccggaagcaggggaggggaatggtgtaccaggcagagggaactgagatcagagggctctgagtggctctgcctgtgagctcagactcaaaagctcctgcctccgtgtgccgcctcctccccatccccatcaccttcatctgccgggcaatctccttcttctggtgcagaatgtactccaggatggcctcacgctcatacaggtagccatctgggctgcaaagacagggtgcaatgagaaagaaagaaagtgatcctcccgcctcggcctcccgaagtgctgggattataggcagaagtcatcatgatcagtcccaagttcaattatttgctagaattcacagaactcagcaaagctgttatactcatggtgatagtttactgcagtgaaaggatgcagattaaaatcagcaaaggaaaaaggcacatggggcagaatctagtagagactagatttgagcttccagctgtcctctcccaatagagctgcagggaaagtgcttcattctctcagcaacaatgtgtgccacatattgttgcagccacgagttcgagaccagcctgggcaacaaagtgagctcccctctctacaaaaaacaaacaaaaacgccaggtgtggtagtgcacacccgtggttccagctactcgtgggggctgaggcaggaggatcacctgagcctgggatatcagtgagccaagatgtccccattgcactccagcctgggcaacaaagtgaagactctgtctcaaaaaaaaaaaagaaacctgaaggtggccttgggggccctgatcattaattactgtcttctacaaaatataccactaattgagcacgtatttagtgcctggactcagcacctgttaagcctttgccctaccatcagaggtaggtcatgggaagtgtccaaaggtgagctgctccgatggcctcggcaatgctctgagagccctacaccccattagaagtatgttcctttccatatgttccacactatgaaacagatgctaggatcatgcccatgtcccatgtgagaatacagaggctctgaggataaactgctcatccagggttccctggctgtgcaggtggccagacccacgcacacagcctcctcctggcggttcccttgctctccccacccagacctacccatccctgttcccagctcacgtgacaacaggatcgtggcaaggctgcagggagagacaacagcagtcgaagtccttcacggcatcccggctcagtcgaatgttctgggtcccatagcccgaggccgctggggacagagatgggcagagtgatggaggggcggagcaacaggagacatgtccgtctccaaagccccagagagaggcacagagacaacgcggtggtgggggtgggggactcagagagaaacaggcagttgggagccgctgcctgtgtgctggggccacgggctgaacccacagggagttgtcaaccctggagggtgagaggcagacaggcctggtcactgagtggcagcttggtggaggggctgacggctgactcccctccacccttctgactgtgaccaagctcaagtgcctgtccctctttgggcctcagtttcttcctctggaacatggggtaacaagagcaccctccctgacactctgttgggaggagtgagttcatgcgcagaaggcagagaacacagtgccgggccacatggggtcatgggatcacccagctgttgtttacatggtcatggccatcagtgtatatcgggggcgggagagagacagggacagaggaagcaaaacctggggcacgaggggagagggtgactccaagacacagccatgtcccgcctcttcccaccccagccctgcacctgtgtccttcttcttctcgtggtaggtgtagacggcccctgcggtgcagttcttgccatgccgcgtcatcctagggaggaagggacagtggcaggactgtggttaccggaggcaggcagcacagggaagacctctgcagccctcagagctgatctgccccccttgatgggaaagcggaggcggagaaggggggtgaggtggaagagagggagggcatgtggtcgccaggcctcctccaggaagtcctccttccagactcacctagactcatttatatgtgaaaatagcacctttaacaacaaaactctttgtttggaggtaagagggtgagagaccagagttcaaattctagccactacttcagattagctagggtggtggctgtgccatttaatggaggggaaaaaaaaagacaccaagggggccactattgttgatgaatccactccaccttcccttcccctctcatatctgtaagctctgactgaggccaaggcgtggaccagcccagtgattggctcaaggctgggcacttagctaaggcttgacacttagctaaggcttgacccaatcgctgcctgccagtccactagcgactggatctagcagctgtgattatgtctcagatcgaccgatcagagggcaggtcagagtagggctctgtgtctaggggaagagctacctccactcccactgcaggtaaaggaggaagagaagaccccagaaccctggagctcaattcaaaaagcaaagctttttttattctgtaagttttcaaacacatacaaaaccagaatagtataaggaacccccatgatgtacccatgtcctgcggtccagcagctgtcaacattttgccaccttactttgatacctttgatcattccccatacttaagggcaacccccacccttttaaatgactttattgagacacaattcacataccataaaattaacccttttaaagtggtttcagaccaggtgtagtggctcacgcctgtaatctcagcactttgggaggctg[134 bp omitted]gaggcactgagaatcacttgagcccaggaggcaggggttgcagtgagccgacatcatgccactgcactccaacctagacagagcaaggctctgtcacaattaaaaaaaaaaaaaaaaagacattgcctaagccaagataatgcacatttattcctatgttttcttctaggggtttgatcattttaacttttactttttgagttaatttttgtgtatggtgtgaggaagggagccccctacttttctggagttcatttgtaaaaggagaagccctgaacccacagaggctgggcagctttcaccaagactgcttggccagtaaacagcctgcatgcctgtttgtttgtttgttttttgagacggagtttcactcttgttgcccagactggaatgcaatagcatgatcttggctcactgaaacctctgcctcccaagttaaagcgattctcctgcctc[220 bp omitted]gccaggctcagggctcacgcctgtaatcccaaaactttgggaggctgaagcaagaggactgttgagcccaggagatggagatgagcctaggcaacacagcaagatccatctctattaaatttaaaaacaaagaagttgatggccaggtgcagtggctgatgcctgtaatcccagcactttgggaagccgaggcgggggcggatcacgagatcaagagatcgagaccatcctggccaacatggtgaaaccctgtctctactaaaaatacaaaaattagctgggtgtgatggcacatgcctgtagtcccagctactcgggaggctgaaacaggagactcattgaacctgggaggtgcaggttgcagggagtggagattgcaccactacactccagcctggtgacagacagagactctgtcaaaagaaaaagaagagaagagagaagatctagtaacattatatacttgtctcactcatctctaagttgccacctaaaaattctcccaagcttaaacagttgcaaaggatacaatttccagcaacgtaaatgtgtagctgatggaatctaaatactgtaataatttgagaccatttgaaaaatgcaagaaaaagctgtttcaacagcagaaaattatacatgtcctgtttttctctttgaacttgtatttccgttccacttccctctctgccacccatttttaatctaacatcgttttttctttttgtttttttttttgagacagggactcactctgttgtccaggctggagtgcagtggtacaatcacagctcactgcagccttgacctcctgggctcaagtgattctcctgcctcagcctctcgagtagctgggactacaggcatgtgccaccacgcccagctaatttttatatttttagtagagatggggttttgccatgttgcccaggttggccttgaactcctggactcaagtgaactcctggcctcccaaagtgttgggattacaggtgtgagccactgcacctggcacatcatatcttttgtgcttgaaaattcttttttttttttttgagatcgagttttgctcttgttgcccaagctggagtgcaatggcacgatctcagctcactacaacctccgcctcttgggttcaagcaattctcctgcctcagcctcctaagtagctgggattacaggtgcatgccaccatacccagctaattttttgtatttttagtaga[143 bp omitted]ttatatgtctctgcaagaaataaaaaatatggataggaaatccttttaaacatttcccattgttcctaggctataagagtccaatactcttctagatcagtggttctcaaagtgtgggtcctaggaccctgtggtcccccaacacatttctagacagtctgcaaggtcaaaactgttgtcttaataatactaagacattatttgcctttctgattctcattctctcacaagtacaccagaggctccatgaggtgtgacactgcaacactaaattagtagtaatttgttacaacaatgataggaaactaatatagtcaccagggaaacgcacattaaaacttcactgaaggccgagcaccgtggcttacacctgtaatcccagcactttggaggctgaagcgggcagatcacttgaggtcaggagttcaagtccagcctggccaacatggcaaaaccccatctgtactaaaaatacaaaaagttagctggtcgtggtggtgtgcgcctgtaatcccagctactggggaggctgaggcatgagaatcgcttgaacctgggaggcggaggttgcagtgagccaagatcacgccacggcactctagcctaggggacagagcgagactccatctcaaaaaaaaaaaaaaaaaaaaaaacaaaataaaacttcattgagatacctccccacacgcaccacaagggttgcaattagacagaggggtgcaggcgaggacatggagctactagaaccctcgtgcactgctcaggggagtgcagaccagcacaaccactttggaaagcaactgtcagtatctactgaagccaggcatatgccagtcctatgagccagcaattcgtctcccacgtatacacctaacagaagggtacacctgtttacaagacacatacactgccctattcacaatggctcataaactggaaactaccccatgcctgtcagcacagagtagataaagaaactgggccatatcacataatggaaacacccagcaatgagacacaacagcctactgtcatacccatagtatagctgaatctcacagacaccacgcaggcgagacaccagacacgcaaaagaaaacttactgtatgatcccattcatgtgacgttcaaaaactcacaaagtaattactacaccagaagttatgtgtgggtgggtgtggtggctcacacctgtaatatgaacacttggggaggccaaggcaggaggattgtttgagcccaggagtttgagaccagcctgagcaacatagcaaaaccttgtcactacaaaacatagaaaaattagctgggcatggtggtgcatgcctgtagtcgcagctacttgggagtctgagatggatcacctgagcccagggaggtcaaggctgcagtgagccatgattgggccactgcactccagcctgggagtcagagtgagaccctgtctcaaaaaaaaaaaagtcaggtgcctttgggaggcagaaggtgggggtgactaggaggggcacaggtagcatctgggaggctgggaatgttgtttcttgatctgggtgctggttacatgggtgtgtttgctctgaaagtcgctgggttagacagttatgctttctgtacttctctgtacatgttataaaaagaaattggctgggtgccatggtgcacgcctgtaatctcagcacttcgggaggctgaagctggaagatcacttgagctcaggagtttgagactagtctgggcaacatattgagaccccatctctacaaaaaaatatatatatataaaaatttgctgggtgtggtggcacacgcctgtaatcccagctactcaggaggctgaagcaggaggactgcttgagcctgggaggtgaaggctgcagtgagccaagatggagccactgctctccagcctgggcaatagagtgagaacctgtctcaaaagaaaaaaaaaagaaagaaagaaagaaattaatggcgggggaacccccactccatcttggacatcattccccatcagcccaccaggcacgtccttggtctttatgtggctacagattcatccctgaatgaacacaactcttggatttgacacctgtggacagacatccttgtccactatgacaaagcagtttggtacccaatgtctagcacgtgtccaaggatgtttttcagataaattctttttttctttctttcttttcttcttcttttttttttttgagacagtctcgctctgtcgtccaggctggagtgcagtggcgcaatctcggctcagtgcaacctctgccacccgggttcacgccattctcctgcctcagcctcccgagtagctggcactacaggcgctcgccacc[184 bp omitted]aatacagtggtacaatcatagctcgctgcagcctcaaactcctgggctcaagtgatcctcccaccatagcttcccaagtagctgggaatacaggcatgcaccaccatgcccagctaattttttatccaggcagggtcttgctatgttgtccaggttggtcttgaactcctgggctcaagtggtcctcctgctttggcctcccaaagtgctaggatgaagggtatgagctactgcacccaaccctgcttttaagataaattttaaaagtggaataactgattcaaagggtgtgtgcatttaaaatgtggttagaggctgggctgagtgcagcaatgtttacaactaattgatcacaaccagctacagatttctttgttcctttccacttccactccttcacttgaccagcc[132 bp omitted]gcctcccaggttcaagcaaattctcctgcctcagcctcctgagtagctgggattacaggcgcgcaccaccatgcccagctaattgttgtatttttagtagagatggggtttcgccatgttggccaggctggtcttgaactcctgacctcaggtggtccacctgcctcggcctcccaaagtgctgggattataggcatgagccaccgtgcccagccaaaaaacttttttttttttttttttgagacggagtctcgctctgtctcccaggctggagtgcagtggcgcgatctcggctcactgcaagctccacctcccgggttcacgccattctcctgcctcagcctcccgagtagctgggactacaggcacccgcca[186 bp omitted]cagactgcacaggtctatatacctccaacaacatgagagagccactcctcacaactttgccccagggcttcctgggactggctctgagctgtgcctgggtcagcaaggaacctcctgcaccatgctgtggaaaatgtgccatcagtgagagactgggagaagatacttgtaatgcctacaatcaacaagggactaatatcattttcatttttattttatttattttgagacagaatcttgctctgtcgcccaggttggagtgtagtagcatgatctcggctcactgcaacctctctgcctcctgtgttcaagcgattctcctgcctcagcctccccagcagctgagatgataggtgtctgccaccaggcccggctaatttttttgcattttttttttagtagagacagggttcaccacgttggccaggctgatctcgaactcctgacctcaggtaatctggccaccttggcttctcaaagtgctgggattacaggcatgagccaccacacccaaccaacaagggactaatatgtagaatagtcagttctactataaggcatgcattcatagaaatcacagcaatatgcaaaatcctgcagtcaaaaaccacaaggcttacagagaaaacaggattgtgtcacaatcctcgtaaactttgtcggtgatgcttaaagaaaaagataagaacagaatacaaaaggagagaacagtttcacacgggctaggtggttaagacataccaacatactccaaaaatatggcagttgaccttgacaaagacttgaagtttgttgtggcaatgggtgtggggtggagggagcgccttgtgaattactgtgatgtggtggaaagagggttatttgagatctgatggaaagtcctagtaccagatgtggatgggtgtggctcctaacacccggggaactgcggtggtggtatttgtttgaagtgccgtgtatgtgtgctttgtgtattcccacacacacacttatagcagagtgcagtttcctggattcaccttggatgcacataagcaaatgtgaaattggtgttatgctcaaattgttccctgatatatcaactgcattggaataaattcacattttcaaaataagcattatagcagaactgatggtacatgaaactccagcaaatcaagaagaaaattacagccactccaatagaaagatgagtaaaagaggctgggtgccgtggctcatgcctgtaatcccaacactttgggaaaccaaggcaggaagattgcttaaggccaggagttcaagaccagcctgggcaatatagctagaccccatctctaaaaaaaaaaaaaaaatagtttgtttgtttgtttttttttttgagacagagtcttgctctgtcaccaggctggagtgcagtggcgcaatctcggctcactgcaacctccgcctcccaggttcaagcgattctcctgcctcagcctcctgagtagctgggactacaggcctgcaccaccacgcctggctaatttttgtatttttagcagagatgggctttcaccacgttggtcacgatggtctcgaactcctgacctcgtgatctgcccgccttggcctcccagagtgctgggattacaggtgtgagcccactgcgcccggcctgggaggatctttaaatcataatgcttagtgagaaaagagtaaaacaagagctcaataccatgtaggcacaggaaatctactgtgcatacaatgatactttttttttttttttttgagacgttatctcgctctttcacccaggctggagcgcagtggcacaatctcactgcaagctccacctcccaggttcacaccattctcctgcctcagcctcctgagtagctgggactacaggcacctgccaccacacccagctaattttttttattttttttttagtagagatggggtttcaccatgttagccaggatggtcttgatctcctgacctcgtgatctgcccgcctcggccttccaaagtgctgggattacaggtgtgagccaccgtgcctggcctacaatgatacattttaaagaacatttggccgggcacggtggctcacacctgtaatcccagcactttaggaggccgaggtgggcggatcacttgaggtcaggagttttgagaccagcctggccaacatggtgaaaccacgtctctactaaaaatacaaaaattagccgggcgaggtggcaggcgcctgtaatctcagctactcaggaggctgaggcaagagaattgcttgaacccgggaggtggaggttgcagtgagccaagatcgcgccatcgcactccagcctgggggacaagagtgagactttgtctcaaaaaacaaaaacaacaacaacaacaacaaaaaagaacacttgcaggtggggcgaggtggctcatgcctgaggtgagcagatcacctgaggtcaggagttcaagaccagcctggtcaacatggtaaaaccctgtctctaccaaaaatacaaaaatgagccagtcgtggtggccacctgtaatcccagctacttgggaggctgaggcacaagaatcgcttgaacccaggaggcggaggttgcagtgagccgagactgtgccaatgcactccagcctgggtgacagacactcatctcaaaaaataaagaaagaataaaatataaagaactcttgcagacaaaaggctccacatgacacatattagttgcattcaggaaagattgtctcctgctctcaagtagcctgcaagtaggatccagaagttggggtggggagcacaaccaagggtcccaccgatgtaaaaagcaacttcatctctatcgcccccttctggttgctttgaaaaacttgcctttcccattcaaaacttgaaacacaaacctctgggagctatggagctctctctccccctactggcgtcttctcagaagccactctttgggttttaggtatatttacacagaatcaaagcaaagacctttacagttggatgcgatctgacaaatgtatacacccttgtgaccacgaccctatggagatacagaaccttcctatcacgctaaataccccctcacgccccttcccgatcaatgtgccccctgaggcagccagggctgcttgcagaagggcgaccttgatcaaacaccccaacttgacccagggtcccctccacatgccaggctcctcctccgacttccccctgacccccaagcttctcagtgaacgtccaacacctgttgcctcccctcacctgccatccgctccccagcccccacaactgccactcatgaaggtcacggtgaccttttcatggacacattccccactctattcttagttgtcaactcccttgaccctctgcagtatttggctctgggcacctcggctttcccagagatgagcttgcttgctgttttgtggccaagaactgaggtttctacatagatggggacattttccctccaaaaataggaggaacacctatagagggagcatttaaactttttttaatttaatttgttttttttgagatggagtcttgctctgttgccgaagctggagtgcagtggtgtgatctcggctcactgcaacctccacctcctgggttcaagcaattctcctgcctcagactcccaagtagctgagataacaggcgcccacgcccagctaatttttttttttttttttttgtattttttagtagagacagggtttcaccatgttggccaggctagttctgaactcctgatctcaagtgatccgcccacctcagcctcccaaagtgcaaggattacgggcatgaaccactgcacccggcaaactctttgatttttaaaactcagtgatttttaagatcctgagaccagaaagcgtgagcgcctccaaccaagggtggaagaatagccagtttcaggatttacaaactctgaaagctgagctctcctgccccacactatattgtctctttggtaggtccaatttcaaactacaaagcagactgctgccatctgctgtcaccagcatttcagagaggaaacaggcaaagagcaggagcgaccgatgtcagcataatccctacctcacagcacaggaaacaggctcacagcatgtcccagctgggaaatggcagagctgggactcagacccaggcagccaggctctggagccattccttttaactaggtgacaactgtcagttttcctaggaaagtcacaatctcagaaaaaaggccaatcaggctggccacggtggcttaaacctgtaatgccagcactctgggaggctgagacgggtggatcacaaggtcaagatgttgagaccatccaggccaacatggtgaaaccccatctctactaaaaatacaaaaattagctgggtgtgttggtgcgcgcctgtggtcccagctgctcgggaggctgaggcagaagaatcgcttgaacccaggaggtggag[133 bp omitted]tctttcagcacatctcagtaatttcagtaattcagatgctaaattttcttttttttttcttttttttttgagatggagtttcgcttttatcacctagggtggagtgcagtggtgtgatctcggctcactgcaaccttcacctccccgattcaagtgattctcctgcctcagccttccaggtagctgggattacaggcacccgccaccatgcctggctaattttttgtatttttagtagagatggggtttcgccatgttgggcaggctggtctcgaactcctgacctcaggtgatccacccgcc[142 bp omitted]acctccagggctcaagccattctcctgcctcagcctcccaagtaactggaattccaggcgtgtgccaccatgcccagctcatttttgtatttttatatttgtatttttagcacagatggggtttcaccacattggcctggccatcagatgctaa[134 bp omitted]aatgtggcgaaaccctgtctctactaaaaatgcaaaaattggctgggtgtggtggcaggtgcctgtagtcccagctactcgggaggctgaggcaggagaatcgcttgaacctgggggcagaggttgcagtgagccaagatcgggccactgcactccagcctggccaacagatcaagactgtgtctcaaaaaaaaaaaaaaaaaaaaagcccggctctgaagcagaccctggctctaagcattttactgaatatcataacacctcaaacggtcgaatatcacaacactccactgaatatcacagcacctcaaatagttgctataaatgaagagaggcacagaggcggtgccctaggttatgcagctagtgagtcctacagctgtgtttgatccaagcacctgtggctttgaccatccactgtgccagctggctgcaggcggcctcaggcactgtgctgaactctgggagtggatcagacagctagtgtgtgtcttgtcctcccctgaaatcctgtctcctttctcctccagagcactgccaaggtttgcctcctccaagaagcctgcctctccgggatcagttaggttctccttgcacttgaccgtgccctgagctacctccgttacagcccgtccctcggtatttcggctccagagtaggggccctggttggtggggcctgggttgaacttcagcctgggtcccagcattgcctggcacctgggaggtctcagagatgtcatgatagaatcaatgaaccacctccaatcctagggccaggggaggtgggttagcaatgaactaaccatgcagccatgacatcatgccattaatacactaataattcattagtaacatgtgaatcacagaagcactggaagaacagaagtaatcatcacatccttcaaccccttaagaatcagaccttgtgggaagcactttccacatgtgaacacattcggtcctcatgacaacctccccacgttctgcccatttattttattttatgtatgtatgtatgtatgtatgtatttattttggagacagtctcactgtcaccaggactgaagtatttttttttttttttttttggagacggagtctcactctgtcacccggactggagtgcagtggcacgatcttgactcactgcaacctccacctcccaggttcaagtgattctcctgcctc[215 bp omitted]cttggagaaattggcctcttcctcagtctattccttgacaaaccagcctcaggggggcttttcagaatggaagtttgattaagtcactctcttcaactgcttcttggacatgactcaagacaaaaaccaaattattcagactaagtgtaagagaaatgggagaataggaaaactgccattttgcaacctctggtgaaatagctgactcaggcaatgattgttgatggatggcattaaaggagaggctgatggggcctggatagtcacaggatgctaattcttgctactggaaaatacacagttgtagctttacaatgcggttttcgatggctgccacctgtctcagtctgctccagctgccataacaaaacaccactctgggtggcttaaacaacagacctattttctccagttcctgaggctggaagtctaagttcaggctaccagcattgtggggttctggtgacaccctcttcctggtttgcagatggctatcttcagtggcagagagaaagctctctggtgtctccttctgttttttgggaggagtctcactttgtcacctaggttggagtgcagcggcggatctcgcctcccaggcccaagtgaatctcctgcttcagcctcctaagtagctgggattacaggcgtccaccaccatgcctggctaattttttttttttttttttgagacggagtttcgctctgtcacccaggctggagtgcagtggcgtgatctcggctcactgcaagctctgcctccagggttcatgccattctcctgcctcagcctcccgagtagctgggactacaggcgcccgccaccatgcccggctaatttttttgtatttttagtagagagggggttt[141 bp omitted]ttggccaggctggtcttgaactcctgatctcatgtgatccacctgccttggcctcccacagtgctgggattataggcatgagccaccatgcgcagcctcctcctattataaggacaccaatccatcagattagggccccactctttcaccttaattatctccacaaaggccctacctccaaatataatcaccttggggaattagggcttcaatatacgaatctgggggggacattcagtctataatgctgcctgagcctgaatgaatttcactacccctgaaaatggggcacccaggcagtatgcaacatgaagcgaccagctctgaagtaatcacctgacagctgaatggaaatttaatcaagtctttacattcaatttcctgattctaggaagtcagaggatatagcagggaataacaaaaaagggccagagagtaaatgttttgaactttgcaggccaaacagcccctgtaagtactccactcagcccctgtagcataaaagcagccacagacacacaaacgggcatggctgtgttccaataaaactttacttttagactctgacacggaatcacatataattgtcataggtcaccaaattcattc[137 bp omitted]ggtgaaaccccgtctctactaataatacaaaaacaaaattagccgggcgtggtggcgggcgcctgtagtcccagctactccggaagctgaggcaggagaatggcatgaacccgggaggtggagcttgcagtgagcggagatcacgccactgcactccagcctgagcgacagagcgagactccatcttataaaaaaaaaatgttaaaaaccatttttagtttgcaggctgaacaaaaacaggtagcagttacaaaagtcagatatctcctggctgttgtggctcatacctggatagggtgctttgggaggcaaaggcaggaggatcacttgaactcacgagttcaagaccagcctgagcaacatgccaaaaccctgtctctaccaaaaaaaagcagcagcagcatggtttttgagaccagacttgaacttgctatgggcaacatagcaagactccatctccacaaaacaaaatttaaaaaattagccgggcatagtggcatgcgcctgtggtcccagctacttgggaggctgaggcaggaggatcacttgatcccaggaggttgaggctgcagtgagttatgatcgtgccactgcaccactgcactccagactgagtgacagagtga[131 bp omitted]agaaaccccatctctactaaaaatacaaaattagctgggcgtggtggtgcatacctgtaatcccagctactcgggaggctgaaatgggacaatcacttgaacctgggaggcgaaggtcgt[135 bp omitted]actcaataatgaaaggacacctaacacaatttgaaaatgggtaaaggattggaatagacagttcttcaaagatctacaaatggccaataagcatgttaaaagacaccagttcacaccccctagaatgactataatcaaaaagataaataataagtgctggtgtggatatggagaaactggaacccttatacattggtggtagaaatgtaaaatggtacagccattctggaaaagtcacagtttctcaaaaggttaaatagtcaccttttgacccagcaattccactgccaatagaaataaaaacatacatccatgcaggcggggcgcggtggctcatgcctgtaatcccagcactttgggaggccaaagcgggcggatcatgaggtcaagaaatcgagaccatcctggccaacatggcgaaaccccatctctactaaaaatacaaaaattagctaggcgtggtagcgcatgcctgtagccccagctagtcgggaggctgaggcaggagagtcgctcaaacctgggagccgagatcacgccactgcactccagcctgggtgacagagcaagactctgtctcaaaaaaagaaaaaaaaagaaaagaagtatatcttgggtaaaggaatattatccagccataaaaagaataaagtagctggctgggcgccgatggctcacacctgtaatcccagtactttgggaggccaaggcaggaggatcacttgaacccaggaggttgaggctgcagtgagccatgatcgaaccactgcactccagcctgggtaacagagcaaggccgtgtctcgggaaaaaaaaaaaaaaaaagaagtattgatacatgccacaacataggtgaaccttgaaaacatgctaaatgaaagaaggaaggcagtcacaataatattttatggtttcatttgtgcaaaatacccagattaggcaaatccacagatatagcagagtagtggctgccaaagactggggtgggaaggattgggaggaaatagggaatgactgctaatgagtaccagggtttctttttgggtgatgaaaatattcttaaaatgatagtgttgatggttgcacaactctgtcaacgtactaaacaccactgaattgtatattttcaatgggtgaactatatgttaggtaaatcatatcccactaatgctttttttttttgagagggagttatgctcttttgcccaggctggagtgaagtggcatgatctcagctcactgcaacctctgtccctagggttcaagcaattctcctgcctcagcctcctgagtagctgggattataggtgccagccaccatgaccagccaatttttgtatttttagtagagatgaggttttaccatgttggccaggctggtttcgaactcctgacctcagatgatccacctgccttcacctcccaaagtgcaaggattacaggcatgagccactgtgcctgcccaatggggatttttaaaacaggtagctggcaggatttgagtttggtctgtagaacataattagctgatccctggcatgaggaaacaagtaaaatgaggccgggctcaatggctcacacctgtaatctaagcacagcactttgggaggccaaggcaggaggatcgcttaagcccaggagtttgagaccagcctgggcaacatagtgacaccttgtctctatctattttttcttttttttttttg[134 bp omitted]tcatgcccggctaaggggtttcaccgtgttagccaggatggtcttgatctcctgatctcatgatccgcccgccttggcctcccaaagtgctgggattacaggcatgagccactgtgtctggcctatttttaaatacttaaaaaaaaaaagaaagaaaacagaagcaggtaaaatgagaccacaaaaaagcaaacgggacaaattcagatggtgggatgatcaactgaactagaattagtttcttcaatgaatcgattacaccaagaaataaccaaagtggagtggaagggggaacagttctaaattaagagagatgtaaaagacgatagcaattacttaactatatcctgattccaacaaacccacagttacactggacttgactctgcaccacgtaatggatagtagtctagaattacggttgttcttttaaagtgtgatgatggtattgtggtcatatcagcaatgtttctggtttttacacacgcaccctgttagataaaatttatagaaggtcattggtttggattgagctcctgcactaggttcaacagaccaaaccaaaatggagacactcatgctaaagttccatgcttccaagccaaaactaagttgatatctgatcttctgagatatcaggagagagataatagccaaatccccaaacaacccagttttagcccacctgataaaggaagtcccctctactttaacctttaacttagaaatttaatcaagttaatcaatttaatcaactagctttttgttttccgtttctgattttctcagccctttgtctctgaaaacaacctctgctcagctcatcggaacactcacgctattttccataattagatgttgtttgattgtagattcacgaataaatgccaattaagatcttctcactaaatgtgttgcaattttgtcttttgacaatccttaagtgtcatgatgcctacgatttgttttaatctctttaagtttaaaaaaatacagcaagtatggcaaaaataatcattggtgatttgggtgacaggaattcctgtattcttctctcacttttatataagtttgaacattttcgtaagaaaacattaacatcaaactgcctcaaggaccgttcaagccccaagttcacagaattagcagcacaatcagaatgggaatccatgactgcctgaccccgaagctccacacaagaaaacgtgaatccctgcaccaaccccgaaagggaaggggctgtcaaaaaggtgaagagaaggtggcgatggatgactgcacaatctagtatcgcccgccgtcccaccacagtctgagaaactgaggccaggaaaggagttctccctcctcaactcccactccttagacccccagcaatcccagtccactccttcccttgggaccaccagcaaatagccatcatctacagcagaactgtaactctcaggagaactggccgatgctagctaccacttgactgagtttatagtgagagagagagacaaagagagagagaactgcccgatggacggttggccacctccagcagagtgtagttcagcttcaaacttggggcgcccggacagctgtattaataatgattgacagggaatcgggaatccaaaatcttgccccagtctccctcaagaccccaggcctctagcccgcaggaaagcgatcccagcaacactcttcctgcaccgcctcgaactcacctcactaacgactcccagtccctcggtcgcttcttcaactgtgccccgacaccggaaaggagcactattttccccctccgctccgcccacttccgcccagcagaaggcaccggaagtagagctgcccctagttgcggaagtgcctcgcctggcttgctcaagtcctctcttctctttctctctccggaaacgtgagtagctaatcgaaagttccggatattgaaactggtgggaatatggggaacgcttactatgtacgaggcatttcccagggagatcgttttttcctgcttggttcccaggttttgagtctctccaagcccaaatttaaggactaatcacttcccctagagatcgggaagcccactttcccaaatatatcatccacttttcttgctgcatcttaaaacaattgagaagagacaactacgctcccattttacagacagagccattgggaaattgaaaatcaaagccgttcaagtcgctctcaggaaacagggatttactgcggcactgcccagctgtcccagggactaaggcatatcgttcccgctagtttctagatacctagagacctagatattaatttttctagctcggacagacgaactcccaggggagagccagagcgggtaggggtcgggagggaggaggagggtcgaatctaatcccccaggtatcccatggtattcgacaccttggcttcctcatggagctctggcctttaagtcctttatcccaaggtccctttaaatactttgtcccttacctgagtcccgcccagggcaggtaatggcaagttccgcccacctgccagaaacggggatcaggcctggttaccgggagtggggcgcccctcctccttatcccctcccctcttccctgtcccctttcacagctggctgtagctggccaaggagttctcgattaaagaggaaggggcagtgctcacatttctgggcaggtaagtgaatgtccctggaggaagagcctggcttggggacccaggcatcctggctccccgcccctccgagacccagaagtttggggctcctaggcccaggagtccagggcccctgcccacttaggtccctagacccaataatataactaatcccctgcctctgcctctctcgtaatctttgttgtctgtgggtggatgtgacaatgagcacagaaagaggcacaagtggaaattaccaggaagggaagactccagatcaccagtggacatgtttataagcatctgtgtcaggtgctgtagacacagtggggaaagaaagataagctgcctgctccttgctttcttctctggcggacactgccttcactgaaatcctggctctcacacttgcacactgtgtgaccttcggcaagctatattacctctctgtgcctcagtttcctgttc[143 bp omitted]tctactaaaaatacaaaaaattagccaggcgtggtggtgcgcacctgtaatctcaactacccgggaggctgagtcaggagaatcgcttgaacccaggaggcagaggtcacagtgagctgagatagcgccactgcactccagcctgggtgacagagcgagactctgtctaaaaaaaaaaaaaaaaaaaaactcctgtgaaaagttttgttttgttttgtttttgacatggaatctcgctctgtcacccaggctggagtgcagtggcacagtctcggctcactgcaacctctgtctcccctttcaagtgattattctggctcagcctcccaagtagttgggattacaggcgcccacaaccacgcctggctaatttttgtatgactcctgtgaaaagtaaaatgagttgaggccgggcacagtggctcacgcctgtaatcccagcaccagcactttgggaggctgaggcaggcagatcacttgaggtcaggaattcaagaccagcctggccaacatggtgaaacc[132 bp omitted]ggcatggtggccggcacctgtagtcccagctactcgggaggctgaggcaggagaatggcatgaacctgggg[131 bp omitted]ggctgaggcacgagaatcgcttgaacccaggacacagaggttgcagtgagctgagactgtgccactgcactccagcctggctgacagagcgagactccatgtcaaaaaaaaaaaaaagtaaaatgagtttatataggtaaacagtatctggcacagaatacaggctgtgtaagtggctgctattattgccattcgtggaccacagaggccagtcagagaggcactgcctcattacccagggactaaggcccttgtcagctgtaacaaacctggttctaggtgtctggaaaatatgaggggccacccctctctgctgctgctatatatggcattaaccacctgcctggatacttcacccagtgaggagacagaccaaggtgagtgtttgggggaagtggcatccagacacttggcgttggcctccccctgactcaggaatgtttctagtccttcctcttccaggagtccaggacccagccccttcctccttcagacccaggaatctggattcccagcccctgctccttcctccaggaccccactgctttccatccccctatgactccagccctagggaccctccatttttctgtccctcatgtctttgggtccagaagtcttcctgggtcccccagaggcccagagcttcctgagtagccatacccggattccaagagccaaccactgggacctggagctgctcacaccagggaacctggaacgggagtgtctggaagagaggtgttcctgggaagaggccagggagtattttgaggacaacactctcacggtgagggcctcgagaccctggagtttcgggccctctctcttctctatacctgtggggaggttgcaggggtaggttctggccttcagctccctcctccttggtgtctcagaaatcaggatgggctagtttgggggtgtgaacctcccagctgaattcctgctttttccccttcttttccactccttccccctcaaggagcgcttttgggagagctacatctacaatggcaaaggaggtgagtgaggggctgaagccatcttgttctgtgcagctaaggtagtcccttcccagcgaggccaaaccaacgtcctccaccccaaattaggtacaagaatcgtctgccccccaattctgtgctctctgaagctggctgctaaaggagttccctcccttaagaccccagctt[135 bp omitted]ctcccgggttcacgccattctcctgcctc[224 bp omitted]aggctggagtgctgtggtacaatcttggctcactgcagcctcaacctcccgggctcaagcgatcttcccacctcagcctcctgagtaattgggactccaggcacacattaccatggtaatttttgtagtttttgtacagacggggtctcactatgtggcccaggctggtcttgaatgcctggcctcaagcaatccttctgcttcagtgtcccagactgctgagattataggtgccaggccccccaccacatcttattggacgcaagtcctgtgtccctaggaagggaaaagtgtcagtggagggaaaggttagagctgtggggcccgtcaggccttaggctcagaggggcaggcccacctgaacccttccctggtgtccagagtaagtggaaagaccagcccctccggcagcttgattgctggggacacagccctctagcaacacgaccaagggaggaagcctgcccatcctcacctgcccattttgcccccaagaaccccttctctgaggggttgccatcttgttcccatcttgttgccagccttgttgctaaggggggctgctccttagcaacggggcctggccaggccagaccagacgaagaagcctgaagcagtacctggctgatttcccctcccccacagccccatcccagcagctgcctggttgctaaggaggccttctccctagcaaccacacctagccaggctccaggacccaaggccttctgcccactggaggaccaccctccgggcctccgatgccccacccccttgtggcccggttgctaggggtagctgcaccttagcaacaggcctaggtctgggctggagtctcacattggagcctggttgctaggggaggtaactctttcctgacaggcctagcgaggcgtagtggctcctcgaatctacctgaaggtgcccaattcaggaggacctgccttctgaagctgcacttgcgccttttgctaaaggggctcaaaagtctgggggtttactgtggtcagatgtggtggctcatgcctgtaatctcagcactttgggaggccaaggcaggcggatcacctgaggttcaggagttcgagatcagcctggccaacatggtgaaacccatctctactaaaaatacaaaaattagccaggtgtggtgatgtgtgcctataattccagctactcaggcggctgaggcacaagaatcgctgcagctgggaggcagagtttgcagtgagcagagatcgcaccattgcactccagcctgggagatgtctcaaaaacaaacaaatggctgggcgcggtggctcacacctgtaatccaagcactttgggaggccgaggcaagcagatcacctgagttcaggagtttgagaccagtctggtcaacatggtgaaaccccatctctactaaagatacagaaattagctgggcatggtggcacgtggctgtaatcccagctattggggaggctgaggcaggagaatcgtttgaacccaggagctggaggttgcagtgagccaagatcacaccactgctctccagcctgggcaacagagtgtctccaaaaaaaaaaaaaaaaaaaaaaaaacaaggaaatggggtcattttgtcacccaagctggagtgcagtggcacgatgacgactcactgcagcctcgacctcctaggctcaagtgatcctcccacctaagcctcctgagtagctgggattacaggcatgcaccaccacgcccagatacttaaaattttttttgtagagatgggggtctcactgtgctgtgttgtctacgctgctctcgacctcctaggctccagtgatcctcctgccttggcctccaaagtgctggaattacaagtgtgagccaccaagcccggccatttttttttttttttttttagagacagggtccagtcacccaggctggagtatagtggagtgatcctggctcactgtagccttgacctccttgggtcaagtgactcttcttcctcagcctcccaagtagctgggactacaggta[138 bp omitted]agtgaaaccccgtctctactaaaaatataaaaattagctggatgtggtggtgcacacctgtagtcccagctacttgggaggctgaggcaggagaattgcttgaacctgggaggcggaggttgcggtgagccgagattgcgccactgcacgccagcctggtgacagagcaagactccgtctcaaaacaaaacaaaaaaccaacattttttccccaggctcagtgatggctcatgcctgtaatcccagaactttgggaggtagagattggtggattgcttgagcctaggagtttgaggccaacctgggcaaaaaatacaaaaaattacaaaaacacaaaaattagccaggcatggtggcacacacctgtggtcccagctactcaggaggcagaggtgggaggatcgcctgaaccctggagaccaagtggcagtaagccgcgattgtgccactgcactccatacagagtcagaccctgtctcaaaaaaaaaaaaattttctttttttttttggtagagcctccctatgttgcccaggctgggctcaagtgatcttcctgccttagcctcccaaagttctgaaattacagctgtgagccactgtgcctagctacaatgaataattttaaaagcgtattccaagtagtacatgtgacatccttttttttttttttttttttgagggcgacagagtctctctctgtcatccagcctggagggcagtgagtggcacaatctccccggctcaagcgatcctcctgcctc[133 bp omitted]aaaacatctgcctcctgggttcaagtcattcgcctgcctcagcctcccaagtagctggaattataggcatgcgccaccgtgcctggataattttgtatttttagtagagacagggtttct[144 bp omitted]cgggctggtctcaaactcctgacctcaagtgatctgcctgcctcagcctcccaatgttctgggattataggcatgagctaccacacctggccaggacatagttttgtttttttggtttttgtttgtttgtttgttttgtttttttttattttgagatgaagtctcactcttgttgccctggctggagagcaatggctcaatctcggctcactaaaacatccacctcctgagttcaagcgattctcctgtgtcagcctcccagataactgggattacaggcatataccaccatgcctggctaatttttttgtatttttagtagagacagggtttcaccatgttggccaggctggtcttgagctcctgacctcaaacgatccacctgcctaggcctcccaagtgctgggattacaggcatgagccactacatccagcctaatctcattaggtttttacagtggggtaggggttatggttcccattttacagaactggcagtggagggtcagagaaaggaatgaggtgaatttcctgaggtcacagggctaggaagggaccccagctctgcctgcttccgggtccattctcttccctcagtgggaaggaattttgatgttggggtgggtggcagtccccgagacagtgtctccccttccctactttcctgcagggcgtggacgagtggatgtggccagcctggctgtggggctgacaggtggcatcctgctcattgtcctggccggcctgggagccttttggtatctgcgctggcgacagcaccgaggccagcagccctgtccccaagagtaagggggcttcagcgaggagggggtggtggtggagagcaggggagggaggaagcattgacctaaagggatgtgctaaggattgggggcaggcaggcactgatgaaagacctaaggacacagtcatttggagagtgagtctgtgagctggcttgtgtctggttttggcgactgtcgctctgtctggatcctcagtacctggcccgcagtaggagctctgaccacttttgctgccagcctgtctttgcggtactgagattaccagtatccgtggaattacgactctggatattgtatctggtgaggctgcgacggtgcagcctgtggtgtcttggtgtctgtggtatgtcagtttcagtggtaacaggtgcagcacctgagtgggtgtgggaaattggtgaggagtgcgtctgtgttgtgttcctgtctatatggatgggctgagttctgtctgtttggtgtgtgttggcctgcctctctacagggctgtctttttttttttttttttttttgagatggagtttcactctcattgcccaggctggagtgcaatggcatgatcttggctcactgcaacctctgcctcccgggttcaagtgattctcctgcctcagcctccagtgtagctgggattataggcgcactccactacgcccagctaattttgtatttttagtagagatgggtttctctatgttggtcaggctggtttcgaactcctgacctcaggtgatctgcccgccttggcctcccaaagtgctgggattacaggtgtgagccaccacgcctggcccttttttttttttttttttttaaaaaaagacaaagtctcactctgttgcccatgttggagtgcagtggccggttcacagttcactgcagcctcaatttcctgggctcaagaaatcctcccacctcagcctcctgaggaactagagctacaggtgtgcgccatgcacccggcagggctgtctttttctctattgctctgcctgtatctggtgcacatgagtgtgtctgaataagagtgtgtctctgtggttgctgatttctgtgtctacctgtctgtgtgcagctgcctgtcatttgaggcgcttttctgtgtgtaaggctaggctgaaggtgaccctccttttctgaagtccacctcccttccagctctgtcccagtgtcaccctgagtctccgtctcctagatcccctctcttcctccctagtctaggtatcctgtaagttgcctctgctaactgtacctttgctgtccccagggccgggctcattagccctctgagtcctttgaaccctctgggcccaccgacgcccctgcctccacccccacccccacccccaggcctccccacctatgagcaggcgctggcagcctctggggtacacgacgcacctccacccccctacaccaggtatggggcgtggcttctgcccgggggcggggcgcagaggggtgggcacgttggaggaggaacctgggctcaggggcgggacttggaatttgggccttcttacctggggcggggcttggagtgcgggggcggggccccatgcaatggtctaggggcgtggcccagcgttgtatgtgtggagccgtataggagggtggggcctgtgcccagagggtcctggattggctgagacgccaagggcggtcggagtggtcctggttgaaggggggagaaaaacagccagatctttgactccctagtgtgcctttcctcttgcagcctcaggaggcctcactgaagagctgctttcgagacccggctctccgaaccgtgcccctgattcataccggattccggaagccgctaggcctcatagacgccgaagctggacttggagtggggaatggtgggagtaggggtcatccggcccgaggcctgccctggcacacgcgtttccgccgcgtatggatatacacatgttttcggcaacgtgttcccgtgtcctggcccctcacgggcccccacactctcctgaccgtgagggcactggtcagttccgcccccgtggtaggcagacgcgcggggaaattcggacccaggagcccagccccggctgtgccatcttgtgtatgggcagatatgacctgacagccccctccagtgccacagggtacgcacacgcagagccccgcctgtgcacacgcgtgtcttcgtgcactccccgtgcggtacaggggcacttcgtaacccagggaaagggcggggggcatatttgcaagcgcgctcggtgcgggcaggctcgcattgcacccagggagctggagttgagctgttcccctaaataaaaacccttcggaaaggagaccaaaaaaagcagaaataatgcaaaaaataataatgaaatgaactgcgatcccgggcgcatcggaactggttttctgtgcaaacgcgccctacacccccaggccctgctcgcgctcagtctctctctcactctccctttttttttttttttttttgcatttgcacgggattgtgggaggaagcggagcgcagccagacaccccgccgcccgcccccccttcccctcccccctcccccagccgccttgtgcaaagatggctgcaccgtgagcgcagaggaggaggaggcggcggcggcggcggcgagagagcgagcacccagcgcctgcacccaccccggggccgcccgggacgccccctcccgagcgcgcgcccccccttttctctcgcaagcgccggggcaaaggcggagacagcggggtccctcctccccccttccctcctctagggggaaccccccttcccccttccttggctcagcgactgcaccccctcccttgcccgcccctccgcccctgccccctccctcccccgcccggggccttcccgggccttcggcggctgcaaagaaaaaaagagagagagaaaaggggggaaaaaaaagcagcagcggagggagcggcggcggaggagagcgcgcgcgcgccccctccctccctccctccctccccctccccccaatttccaccgcggccaattcatggacaggaactaccccagcgccggcttcggggacccgctcggcgccggggcgggatggagttacgagaggtcagcgaaagctaggtaaggagctgagggtggcctagagaagggggccaaggggtgggagcccagccgggccgggccgggccgggccgggcccgcccggcgacgcgtgcatcgcaaactcccctccggcttgcaagggagcggccttcctcggtttgtaacaacgccgccgccccagtttgcaaattgcaaactccgccaaagccagctccggcatgcaaagggagaattgcagcgggaaaatgggggtgcaaaacaatttcggacgggaaggccttgggaaggtgggagggactggcgaagcaaggcctggacttccccccatccttggattcccggcttggtgacccctcccccccgcgccccaggcactgctcttgcaaaggtgggaagaagagaagaattagaacgcagatctggggggcgcgaaccccctctcaggtcctattgttccgggactgtgcgaggccgcgccactaggcgcccccccaagaattccgcgcgcagagtgggcacggggccccgcccccttcctaagctggggttgtgtgtgtgtaagggagggggtcaggcgtctgggacacgccccctttaatgcccccacccccaaaggcagagaatcctagttgatcgcaaggagtggagcgtttgccctcttgagtctggccacggactggtgccgttgcatgggaagagtcggatgtttcccgggtgtgtgtttgtgtgtctgagcgtgggccctgtgcgtgcgtggctggcagcgtgttcacctgtgaatctgcccctttcctgttgcttattggtgtggcgccctcacacttcacctatccccagcacctcccccccaacacacctggatttcccagcagggcataaccccaagtgtgtcaggattttccgtgtgggattcctccgtctatatcttttcttccccacgggtgagttggatacccgtttgcacacatacctggcattgcatgggcccatgcatttgaacctcaacccccggggatggtcggtgttcttgttcacacttgtacctggtactttccccaggtcttattccctcttctctccaccccccaaaccgttgccgcttgggaaccgatcttcctcctgctcccaacttgttctgcaccaccccatgaagttcagggcctatgtgttcccgtgtgtctacggaagaggaggcgtccatgtggacctctggcgttggccccatagcctgtgtcgccggaacgggggctggggggggtttgtggggtcgacgggggagggctctcatttgcaaatcaagacgcttgctctgccttggaccctcttctgtgtgttagtctcgtctctgagcatgcctgtttgtaaacgtgagactatccgggctctctttattcgggctctggagtgggggccatttctgtggctctttagttgagcaccccgattcccttgtgttctcccctttagggcctacggttccttagcttaacaccccccaccccggtcagctggaagggtccccccaactccccggggggttttctgagcttccttctcagaaggcagcttggaagaaccccctgacgtctcccctttccccccagcttggtttatggcagctccaggacctcgcaccccgagacggacatcttacaccgccaggcctatgcggccccccacccactgcaaagctatgccaccaaccaccacccggcaggtacggcccccatcccgccccgctttgggctggccctccccctccccccgaggcagctgattggctgttgaaagttccgcccctcctaattggccgtggcccgtgccgtggcccgccccttgctgtgtctcctctgattggttgcctttgaggctgctggtcgctgcttcatttctcgccggattcgtccgcccctgcctcgcccctcccctttcgctccaattggccctgttaccatcagcccccaaatcccaccttctcttccaggcttttccgcctctccccaacccaccccaattctttccctctgggtttgccctattcttttggctctttggaactctgaattctttcttcctgattccctttcttcctgattggctctaattctctggcccgccctgttttatcttattttgccccattgccttattctacccaccttgcctttgcctccaaggtttctgattggttccctcttcctaggggtactggtaatgacatgatgctgtccagtttgacccttgaccctcctgattggctccttccctttttccctccccatctttttttctgaaccctcccacttagctcaatcctttctgacacgttctctggtctttcttagacttcattgtcccatcctttcctcttccttgctggaaatatccaaatttggtctccctcccagccttactgaggactctgttcttttgctcctggctctttcgcttctagatttttctacacttttgtctaccatttcctacctgggccccctgtccttatgactggattgccccttgtcttgctttactgtctcacctttcccccttccctcccctcattcatgtctcattagcttggttctatccatcttgtttttgaatttgcccttttctctcccatcccctccttttcctgatccaacttgcttttggcctcttccctttctctcttgactgtatcctacccacccccacctggctgactataacccctgtccccggccaggcctctctggactcttcgacactggcctccaccacgcgggctcagcagggcccgacgcctccgtcatgaaccttatctcggccctggaatcccggggcccccagcctggcccctccgcctcctctctcctctcccagttccgcagtccttcctggcaaacaggtaagcccagcgccggccctgcagggccagggtgggactggctcgctgttctctctgacgcgcggtcttcctcatctccagccatgcacacgccaggccccacggagctcttcatctcgggtgccctgccgggttccagcacctttccgtcctcatctgccctgtcggcttaccaacacccggcttccttcggcagccgccccttcccagtgccctcgtccctcagcctccaggaccccccattcagccctccagctaacgggctcctgtcccctcatgacgtgctgcacctgaagccctcgcaggcacccacggtgccctcttcactgggcttcgagcgcctggcagggggcggtgtcttggggccagctggtctcggtccagcccagacccccccttaccgccctggccccccagacccaccaccacctcctcgccacctcccaactcagttcaacctgctggcttcctcttccgctgccgccgccgctgccgagcagtcctccccacagctctataacttctcgggtgctgccccgggcccaccgccgcctgagcgggccctgccacgccaggacacggtcatcaagcactaccagcggccagccagtgcccagcccccaccacccccgccaccagcccatgcgctccagcactatctgagctgtggaggcagctacccctccatgggccaccgggccaacctggcctgcagccccctgggtggtggggagccctccccgggtgctggggagcctagcaaggctggtcccagcggagccacggctggggcatctggccgggccacgggccctgaggcagcagggggcggtggggctgggggtggtggtggaggttaccgccccatcattcagtcgcctgggtacaagacgggcaaaggtggttatggagcagctgccgggggtgccaccaggccccccccaccccgttcgaccgccacccccaaatgtcagagcctgggtgggccagcagccgcctatgccactgggaaggcctctggggctggaggggcagggggccaggcttattcccccggtcagcctcaagggcttctgggaccccaggcctacgggcaagggtttggaggggggcaggcacaggacttgagcaaagcccccagctactcagggggccccccacagccccccagcggcccccctcctcctggcctggccacatgtcagagctactccccggaccagctgcaggggcagctgtatggggtgcagggcgagccatacccagggccagccgcccactcccaggggctgcccacagccagcccctcgctcagctacagtaccggccattccccagcgctctcgggccatgggggtggctggggacccagctccctgggaggcggcggtgaggccagcccatctcacatcattcgtccgctccagtcaccgcctgccaccggccgtccacctggagtcggctctccaggagcccctggcaaatacctgagctcagtcttggcctcagcgcctttcctggcacctccgggagctggcagctatgcagccggagcaggtggctacaagggcaagggggatggctcggagctgctggcgggcccaggtgggcctcctgcggagcgcacagaggatgaggagttccttatccagcacctcttgcaggcgcccagccctcctcggacctcaggggcggacggcttggtgggcgaggacggggcagcagatgcctctaagggacttggggggagtggcggggccgggggaccaccgggtacaccctacgagttggccaaggaagacccccagaggtaccacctgcagagtgtcatccgcaccagtgccagcctggatgagggtgccactgcggcactggagctgggcctggggaggctgaaggagaagaagaaagggccagagcggggtggcgagacccccgaggggctggccacctctgttgtccactacggggcaggcgccaaggagctgggggccttcttgcaaaagagccctccgcccccacctcccacggcccagtctacccagcccactccccatggcctccttctggaggccgggggccctgacctcccactggtgctgcctccgcctcccccccagctgctcccctcggtcctcagccatgcccccagtccctctcccagcgcctccaaagtcggcgtccacctccttgagccagccacccgcgatggggcaccccagccacctccaccgccacccccgcctccaccacccatgcccctgcagctcgaggcccacctccgcagccatggcctggagcccgcggcccccagcccccgcctgcgacccgaggagagcctggatccgccaggcgccatgcaggaattgctcggggctctggagccgctgcccccggcgcctggggatactggcgtaggcccaccaaactcggagggcaaggatcccgcaggcgcctaccgcagccccagcccgcaaggcaccaaggcgccgcgtttcgtgccgctcacctccatctgcttccctgactccttgctccaagacgaggagcgcagcttcttccccaccatggaggagatgttcggtggaggggccgcggacgactacggcaaggccgggccacctgaggacgagggggaccccaaggctggcgctgggccaccccccggcccccctgcttatgatccctatgggccctactgtcctggccgggcgtcgggagccgggcccgagacaccgggcctgggcctggaccccaacaaaccgcctgaactgccctccacggtcaacgccgagccgctgggcctgatccagagtggcccccaccaggcggcgccaccacccccgcctccgccaccgccgcctcccgcgccggcctccgaacccaagggtggcctcacctcgcccatcttctgctctaccaagccaaagaagctgctcaagacatcctccttccacctgctgcggcgccgcgacccacccttccagacccccaagaagctgtacgcccaggagtacgagttcgaggcggacgaggacaaggccgatgttcccgccgacatccgcctcaacccccggcgcttgcctgacctggtctccagctgccgctcccgtccggccctctcgccactgggggacatcgacttctgcccacccaacccaggacccgatggcccccggcgccgtggccgcaagcccacgaaggcgaaacgtgatgggccaccccggccacgggggaggccccggatccgccccctggaggtcccgaccactgcggggcccgcctcggcctccacgcccaccgatggcgccaagaaaccccggggccggggccgaggccggggtcgaaaggctgaggaggcagggggcacccggttggagcccctgaagccacttaaggtgaggggaaat[138 bp omitted]cccgggttcacgccattctcctgcctc[211 bp omitted]gtttatggccgcaccttggcatttttggggcagggggataataaggtttacatttctaaaatctgtgaggaagttagcgtgaggaatttcagggtctcactgacagaaagacctaagaattgaaattctgaatctaggctgggcagtgtggttcatgcctgtaatcccagcgctttgggagactgaggcgggaggatctcttgaacccagatgttcgagaccagcctggtcagcgtagtgagaccctggtctctattaaaaacacaaaaatttagccaggtgtggctgcgtgtacctacagtcccagctactcaagaggttgaggtgggaggatctcttgagcccaggagttcaaggctgcagggagctatgattgcatcactgtggcctgggccacagagtgagaccctgtctcaagagataaaggaaattctgggtttagggagagaggcaggaggttggagcttacgctggtttgaaactcctgacctcaagtgatttgcctgcctcagtctcccaaggtgctgggattacaggcacgagccacctcacccggtctgcttgcttttagtttctatatcccaaaggatgggcattcagggatcctacattcctgggtctcatgggaagcgggtctagggacctgaactgggctgtaagtgaagaggctcagtgagtccaagttcctggtcttctgagggaggaactccagtcttgtcctcctagaatctaagacaaggggtctgcaggtttgaattctataaattcacaggctgagcacctgtaaatttggatttttgggggctgagggaggatgggactgggggcccaggctactgggccctcacggcccgccactcccatgtctagatcaagctgtctgtgcccaaggctggcgagggtctgggaacctcatcgggtgatgccatatcaggcactgaccacaacagcctggactcgagcctgactcgggagaagatcgaggccaagattaaggaggtggaggagaagcagccggagatgaagtcgggtttcatggcctccttcttggacttcctcaagtcaggcaagcgccacccaccactctaccaggcgggcctgacgcctccgctcagccctcccaagagtgtgccaccctctgtgccagcccgaggcctgcagccccagccccctgccacccctgctgtgccacatcccccaccttccggagcctttgggcttgggggcgccctggaggctgcagagagtgagggtctggggcttggctgcccttcaccctgcaagcggcttgatgaggagctgaagcggaacctcgagacgctgccctccttctcctcggatgaggaagactctgtcgccaagaaccgagacctgcaggagagcatctcctccgccatctctgccctcgatgacccaccccttgctgggccaaaagacacttccaccccagatgggccgcccttggcccccgcggctgcagttccagggccaccccctcttccggggctccccagtgccaacagcaatggcactcccggtgagctctgggcaggtggtctgggagtagagcttaaaggttattatgatcactaggtaacagttgtgcaggttacgcactgtttaagagacaccattcacatacatggtgtaagcttgcgtgtttatgaagggactttcctgattacacaagcattttgaggaaggtctatctttttctaattcactcagaggtgctaagtggactaggaggggccccaaggcagacactggagaatgcagggagacagggcaggtgataagttacagggacaggacaggggctactcaggttctgaatggtgggaggtgtgggaactgaggagggctctgagtcaactgtgtgtgaaggtacagaaagatgtctgggggcagagaaagacttggggatgggggtgggcggtggaagggaaggctaggggcataggaagggtttaggttgtgctctggttttggacacagtttaaggagtgtaatgtcagaaacagaggcattgggaaatgagaggtgggagcttacaggagggcacagaggggagtgttcaaaaaaaaaaaaaaaccatgacaggccgggcatggtggaccacacctgtaatcctagcacactttgggaggctgagacaggaggatcgcttgagcccaggaggttgaggctgcagtgagccatgattgagccactgtactccagcctgggtgacagagcaagaccctgtcttaaacaaaaaaccccaaaaacaaaacaaaaagaccctataacgttcttttttttttttcttgagacagggtctctctatgtcacccaggctggagtgtggagtgcagtggtgcgatcttggctcactgcaacctctgccttccgctcaccgcaacctctgccttccaggttcaagtgattctcctgcctc[134 bp omitted]cagcctcccaaagtgctgggattacaggcatgagccaccatgcctgccctctgtgaggttcttaaaaagcctgaagaagggagctggcagacaggggagaggttagcagtctgcatactggtgagcaggccaaggaaaggacaaagatggtcctggagggaggaggatgaggccttggaggaagaggaggtgaggaagtagagttagggaggtgatgatttaggagttgggagggtcattcaggaagaggagttaagaaccagacaagggctttaagaccacaaagagacattccaggactgagaaggggattagggataggagacaggtctcctttgcagccgcaggagccagagtaggtctctggagagactctgatagggtagaagggacactgggagctgagtggtagttacagaggggcttttggtatagaaagcagtgtttaaaggacaagaggaaaggtgccaggaatgatgaataacatccaggcctgatgtccctgtctcccccagagcccccgctgctggaggagaaacccccacccactccacctcctgccccgactcctcagcctcagcctccgccaccccctccgccgccacagccagccctgccctcgccacccccgctggtggcccccacgcccagctcaccaccgccaccgccgctgccgccgccacctccaccagccatgccctcgcctccaccaccacccccaccagccgctgccccactggctgctcctcctgaggagcccgccgccccgtctcccgaagaccccgagctgccggacacccggcccctgcatctggccaaaaagcaggagacggcggcagtgtgtggggagacggacgaggaggccggcgagagtggcggagagggcatcttccgggaacgggacgagttcgtcatccgtgctgaggacatcccttccctcaaggtgagtcccagccttctccagaaactgggcctgatgggtttggtcacctgtttgttgagtgcccgctggatgacaggcttgtgctgagacctgcagatccagtcgtggccgggccgccctggaatttgcagtcctatggggctgatagaggtgtcgaggacctgcgggcctcagaggtgttatttgcgtttgtgtctgtacatgcattacctgtatataaggtaaagcgattgttaacgcgtatgtgtctatatgtgcgttacctgtatataaggtgaaccgcttgttaatgtttatgcagataccctgctgtgggtggtagaggaccagtactgtacaagcagatgaggctctggccctagggagcttctagtttaatggaaccagccagagaggcgggctgctttgccatttatggcacaatggtggaaatgtgtcattgacatagactacctgcagatacacacttatgtaacctgtaaatataatcatgaattgggccggacgcggcagcttacacctgtaatctcagcactttgggagtttgagaccagcctaggcaacataatgaaaccttttctctcaaacaaacaaaaaaagtgaatcatttaggaatggttattgtgtgtcaggccatatctttttgtttttttgagatggagtttcgctcttgtccaggctggagtgcgatggctcaatctcggctcactgcagcctctgcctcccaggttcaagcgattctcttgacttggcctcccaactatctgggactacaggcgcaggccaccacacccggctgatttttgtgtttttagtagaaatggggtttcactgtgttggccaggctggtctcgaactcctgacctcagatgacccacctgccttggcctcccaaagtgctgggattacaggtgtgagccactgtgcctggctggccatagcttcaatatttaccttaaatacttaaatacgtaaatgcagaccaacagcctgttcactgcttccagtttgtctaccgcaggagcttgaaaactatggcccctaggccaaatccagcccactgcttgtttttgcaaataaagttttattggcacacaaccatgcccattcatttacatgttgtctatggctgtttttcccatatggcagagagctgggtagttagctggccctcaatggcaaaaaatatctctggctcatcatgaataaagtttgctggcctctactgtactgggttcactggacaaatagagttggatcagaggattaatgtgcaaggcacttgacaggggtaggtgttaccaggtgcccatggagtgctctgcacagggcatgcggctgagcaggtgctcaggaggtcagcccattctcaccctgatggtggcatggacgccaaggccattctccatgtcaatcattgtcattgattgtactgattatgatacaggattattgtttggcccttcgtgtacagtgtgacatttaatcttggcggggcatggcggttcacgcctgtaatcccagcacttcgggaggccaaggcaggtggatcacttgaggtcaggagcttgagaccagcctggccaacatggtgaaaccccgtctttactaaaaatacaaaaaattaactgggcgtggtagggcgcacctgtgatcccatctactcgggaggctgaggaaggaggatcacttgaactctggggtggaggggggaggttgcagtgagctgagattgtgccactgcactccaacctgggcaccagagcaagactccatctcgaaaaaataataataataataatttagtcctggatgttgttttaatttaatcttcgatgtgacatggagaaattatgggaagaattaattattaattataaggataataactatcattacacttttttcttttcttttcttttctttttttgagacggagtcgcccaggctggagtgcagtgacgcaatctcggcttactgcaacctctgctgcccgggttcaagcgattctcctgcctcagcctcctgagtagctgggattaccagcaagtgccaccacacctggctaatttttgtatttttagtagagaaggggtttc[131 bp omitted]ggcaaactcaaatgtattttttcctgtgttatttcaatctatttcattgtgggaaaagtaaataatagagcaggccgggagtggtggctcacacctgtgatcccagaactttgagagactgaggtgagaggctcacttgaggccaggagtttgagaccagctaggcaaatagcaagacctcacatctaccaaaaacaagggagcgagactgtctcaaaaaaaaaaaaaaaaggatattgacatcgtaggccaggtgcggtagctcacacctgtaattgcagcactttgggaggccaagacgggcagatcacctgaggtcaagagttcaagaccagcctggccaacatgatgaaagcccatctctactaaaaatacaacaattagccgggcatggtggcaggcgcctgtagtcccagctactcaggaggttgaggcaggagaattgcttgaacctgggaggcggaagttgcagagagccaacatcacgccactgcactccagcctgggccaaaagaacaaaactctgtctcaaaaaaataaagaaaaaaagaatattgacattgttaaatgaccgtcaccaccatccatctccaagttttatctttttatataaaataaacttgattatagagactactagtagcgttttacagggatggaaactgaggctcacacaggttaaaaagtccttctgattggggatttctatgcccgttttttctgagacagggtctcccttgttgtccaggctggaatgcagtgacgtgatctcagctcactgcaacttctacctccctggttcaagcaattctcataactcagcctctcgagtagctgggactacagaggatcccaccatggttggctaaattttgtatttttagtaga[143 bp omitted]ggcacagagagataaagtagccttcccaggcttttgtagcttgggatccacacccagccctgctggccctaggaatccgtattcttttttttgtttgtttgagatagtgtttcgctcttgttgcccaggctggagtacaatggtgcgatctcggctcaccgcaacctccacctcccgggttcaagcgattctcctgcctcagcctcccgagtagctgggattacaggcatgtgccaccatgcctggctaattttgtatttttagtagagatgggatttctccatgttggccaggctgctctcgaactcctgacctcaggtgatctgcctgcctcagcctcccaaagtgctgggattataggcatgagccactgcgcccagccaggaacccatattcttatccccgactcagccatgcaccgtgtacgttctagtcaaacgcagctgagccagcattgggtcaaatgaacagggccctggggcagggactttgaccatccccattttacagatggggaagttcacgttcagagaaagggagtcagtcgcctggccagtgccaacctgggattggagccagggccacctgacaccacctcccagctggcacggggcaggggagggggccaggcgaggactcagatgcttaaaatacaacttgagtgtgcattataatgggggcaaagccccacgcctttgccaaatgtacagaccttggggactcatttgtgggcctagagatggggcaggctgctggcatagttaagagcccagctttggtttaacctgactgactcaaatctctgccacttattattattttttttgtgtgtgtttttgagacagggcctcactcttatcacccaggctggtgtacagtggcatgatcatggctcactgaggcctcaaactcctgggctcaagcgatcctcccacctcagcctcccaagtaactaggactacaagcatacaacaccatgcctggcaaatttttttattccttaagtagagactggggtctcactctgttgtcctggctggtcttgaactcttgggctcaagcagtcctcccgtctcagcctcccaaagtgctgagattgccggtgtgagccactgtgtctggacttttttttcttcttttttttttttttgagacagagtctcagtctgtctcccagggtggagtgcagtggcgcaatcttggctcactgcaaccctcgcctcccacattcaagcgattcttctgcctcagcctcctgagtagctgggattacaggcgcgtgccaccacgtcaggctaatttttgtatttttaggagtttcactgtgttggtcaggctggtctcgaactcctgacctcgtgatttgcgccgcctcccccgccccccaaccttggcctcccaaagtgctgggattacaggcatgagccactgtgcccagcccatttttttcttttataccatctctctttttttttttttttttttgagatggagtctcgctttgtctcccaggctggagtgcggtggcacaatctcagctcactgcaacctccacctcctgggttcaagtgattctcctgcctcaccctcctgagtagctgggattacaggcacctgccaccatgcctggctaatttttgtatttttagtagagatggggtttcaccatgttggtcaggctggtagaaaccactcttaaagcccctacaaaaacaagccatagaccattgtttattccagaaaaacagcaatccaatataaatatcacctgagccatatatgtgattttaaatgttttcattcctggtttataaagataaaaaagataggtgaaattagccataggtggccaaagtgctgtaatctcagcactttgggaggacgaggcaggattgtttgagcccaggagttgcagaccaggctgggcaacattgtgagcccccgcctttaaggaaaaaaaaaagaaagaaagaaattagccataggaatgcattttatttaacctaacatattgaaagtattatttcggctacatgcggtggctcacacctgtaatcccagcagtttgggatgttgaggtgggaggatcacttgagcccggatgtcgaggctacagtgagctatgattgcaccactgcactccagcctgggcagcagagtgagcctctgtcatgtacgtgtgcacacacacacacacacacagagtttcagcttgtaattaataaaaactattaatgatgtttttgccaggcgtggtggatcatgcctgtaatctcagcactttgggagtccaaggtgggtggattgcttgaggtcaggagttcaagaccagcttgggcaacatggcaaaacgccccccctacaaaaaaataagaaaaattagccggatatagtggcatgtgcttgttgtcccagctacctgagaggctcaggtgggagaatcgcttcagcctgggaggtggaggttgcagtgagccgagatcgtagcactgcactccaatctgggtgacagagcgagaccctgtctcaaaaagaaaaaaaaaaaagaaaagctgttggccaagcgtggtggctcacgcctgtaatcgcagcactttgggaggctaaagcaggtgagtcacctgaggtccggagttcaagaccagcctggtcaacatagtgaaacaccatctctactagaaatataaaaattagccgggcgtgggggtgggcacctgtaatcccagctactcaggaggctgagacaggagaatcacttgaaccttggaggcggaggttgcagtgagccgaaatgacgccattgcactcaagcctgggcaacaagcgtgaaactgaggctcaaaaaaagtaaaagaaaaactgttaatgatgttttaatattattaaatggggtattactaaaatgaaaagttaagaggttttacattcttttttgcataccaagacttcaaaatcctgtgaatactttgtactcgttgaacacatccattggaccagccacatttgaagtgctctagccgacatgtcaccccagtcatggtggctcaaacctgcaatcccagcacttcgggaggctgaggccggcagatcacttgagcccaggagtttgagaccagcctgggcaacatagtgagaccctgtctctacacaaaattctttttttttaaaattttttattttttgagatggagtctcgctctgtcaccaggctggagtgcaatgacgcgatctctgctcactgcacctccacctcccgggttcaagcgattcttctccttagcctcccgagtagctgggactcctgcctcagcctcccgagtagcgcagactacaggcaagtgccaccacacccagctaatttctgtatttttagtagagacggggtttcaccatgttggccagggtggtctcgatctcttgacctcgtgatccgcccgacttagcctcccaaagtactgggattacaggtgtgagccaccgcgcccggcctctacacaaaattcaaaaaaacttaaccagacatggtggtgcccacctgtagtcccggctactggagaggctgacgtgggagaatcacctgagcccaggaagttgatgttgtagtgagccatgattacaccactgcactccagcctgggtgacagtgaatgtgaccctgtctcaaaaaaaaaaacaaaaaaaacaaatcaatctcaaaagctcaagaaccacttgtgggaacgagctgctgaattgacagggccaggctagcccattctccttcccccgtctgtcaactgggactgttgttggggttgtcataagggctgggcagcgtgtatactccaagcatgtaagagttcactgggtggagactgggcacagtggctcctgcctggaatcccagcactttgggaggctgaggtgggtgaatcgcttgcgctcaggagttcaacaccagcctagtcaacatggcgaaatcctgtctgtactaaaaatacaaaaaattagccaggtgtggtggcacatgcctatattcccagctaccctagaggctgatcaccggagtttgagaggtcaaggctgcagtgagccaagattgctcgattgcactcccacctgggcaaccggagtgagaccgtctcaaaaaagaaaaagttgtctgggcatggtggttcgcatctgtaatcccagcactttcggaggtcaaggtgggtggatcacttgaagtcaggaggttaagatcagcctggacaacatggtgcaatcccgtctctactaagaatacaaaaattagccggacatggtggcgggtccctgtaatcccagctactcaggaggctgaggtaggagaatcacttgaattcaggaggcggaggtttcagtgagccgagatcatgctgctgcactccagcctgggccacagagtgagactgtctcaaaaaaaaaaaaaaaaaaaatttgttggatggagaagagtatggtgttggggttgtccaggcagaggaaacagctgtgcaaaggccctgtggtgagggaaagcacgctgtgtttgaggtgtacagggatgcaaggtgttgaatggctggacagtgaatgctgaggctgggctggtgggctgggcccagccatgttggacttgggtgcaggggtgagttccatgggtgctgatgaagacattaggctctgtgccgtttagagcccctggccagtagggaagtgactggggagttgttcaagcctggatagtactctgtccacagcctctgtcctgggacggactcccctgtcaatgggaccctgcagttttctttttctttcttttttttttttgagacgaagtctcgctcttgtcccccagactggagtgcgatggcgcgatctcggctcactgcaacttctgcctcccaggttcaagcgattctcctgcctcagcctcccgagtagctgggattacaggcgcctgccaccacacctggctaatttttgtatttttagtagagacaaggtttc[131 bp omitted]atcgagtctgagtgtctgtagctcagtggcttacatccgcactgcttacaccacatgtcttagcttgtcgcagttcagtttctcagaagaaaatctgattggttctgctcagcctatagggccaagatgaggtcagtggctgagtgcagtggcccacgcctgtaatcccaacacattgcggcctgaggtgggaggtttgcacgaacctgggagttgggcatgccatggtaaaaccctgttcctattttttttttttttgagatggagtctcgctctgttgcccaagctggagtgctgtggcgcgatctcagctcactacaagctccgcctctgggttcacgccattctcctgcctcagcctctcaagtagctaggaccacaggcgcccgccaccacgtccgtctaattttttgtgtatttttagtagagacggggtttcaccatgttagccaggatgatctcgatctcctgacctcgtgatccgcccgccttggcctcccaaagtgctgggattacagatgtgagccactgcgcccggccttttttttgttttgttttttgagacggagtttcactctgtctcccaggctggagtgcagtggcacaatcttggctcgctgcaacctctgcctcccaggttcaagtgattgtcccctcagcctcccgagtagctgggactacaggcatgcaccatcatgcccggctaatttttgtatttttgtagagacggggtttcaccatgttggccaagctggtcttgaactactgacctcaggtgatccatctgcctcggccttccaaagcgttgggattacaggcatgagccactgcgcctggccatgaaaccccattgccacaaaaaatacaaaaattatccaggagtggtggcgcatacctgtagtcccagctacttggtgggtaggtggctgaggcaggaggatcacttgagcctaggaggccataggtaagctatggtcatggttgtgccactgcactccagcctgggtaacggactgagagggtctcacaaaaacaaagaacaaaacaaaaaaggccaggcacagtggctcacgcttgtaatctcagcactttgggaggccgaggcaggtggatcacctgaggtcagcggtttgagaccagccttgccaacctggtaaaaccctgcctctactaaaactacaaaagattagctggccctagtggcaggtgcctgtaatcccagctacttgggaggctgaggcaggacaatcacttgaacccaggaggcagagatttcagtgagctgaaatcacgtcac[367 bp omitted]tcacccctgtaatcccagcactttgggaggcccaggcgggcggatcatgaggtcaagagatcgagaccatcctggccaacatggtgaaaccccgtctccactaaaaatacaaaaattagctgagcgtggtggcatgtgcctctagtcccagctattcgggaggctgaggcaggaaatcacttgaactcaggagatggagg[131 bp omitted]aaccattgagtaggaggctgtgggccaggccacttttctagtaatcggcagttggcatggtcagtgatatgagtgacatgatgagaggcaggatgggtggggcttggggattgactggccctgtttggggaacgggcaaggctgaagtcagggtgaggcctgatgactgggtgtggggtggggatgctgggaggaaaagtggtttgatggaaggtaccaagcccagtgagaatgtgctagccagagggtctgatcccagctacagtgtcaacagcttcctgagaggtcaccaacaccgggagtgggagggggcagaggtaggggtggtctccttgggctgacaagatgctccaatggcttcctcaagctgctgctttttctttttgagacagggtcttgctctgttgcccaggccagagtgcagtgctgtgatctcagctcactgcaacctccacctcccgggttcaagtgattctccttccttagcctcccaagtagctgggagtacaggcacgcactaccacacctggctaatttttgtattttagtagaggtggggtttcaccatgtaggctgggctggtctcaaactcccgacctcaagtgatcccacctcggcctcccaaaatgttgggattaaaggtgtgagccactgcactcagcctggccccccttttaaagacatgttccttccagggactctttttggcatccgtcacctattccaggaagcattcttggattcagtttaaatttgaggacaagcgcggtggctcatgcctataatcccagcactttgggaggccgaggcaggtggatcacctgaggtcaggagttcaagaccagcccggccaacatggcaaaaaccccttctctactaaaaatacaaaaattagcctggtatcgtaggtgcctataatcccagctactaaggaggctgaggcaggagagtcatttgaacccaggaggcgcaggttgcagtgagccgagattgcgcccctgcactctagcctggctgactgaggctccatctcaaaaaaaaaaaaaaaaaaaaaatctgaggcccctcctctaggcttctgtagtgtccagggaattggcattaggacatttatgacttgtactattatttcttgtgtccatatttcgcgcctctgctgcccttttagtcctcaaggtcacatgctcagtgtgactcacgtccatcagttgccatcgcccagctggggcacacacaaactgcagggtggtggtggttggtgttcaggtgtttgtggggcagggggagcagagatagggagccttcctgttgctctgtcttccctgctgtggacatgctggtgaaatggtctcaggtaacctcacctgcctgttcttggcacaggccacaaactcaccctgttttgtttatttgcttgtctgtctcattacctctgttattacctgagaaggctttttcagtgtcttagactcctcaggttgctataccagaataccatagactgggtggcttataagcaacagagatttggctgggcttggtggatcacgcctctaatcctagcactttgggaggccgagccgggtggatcacctgaggtcgggagttcaagaccagcccgaccaacatggagaaaccccgtctctactaaaaatacaaaattagtcgggtgtggtggcgcatgcctgtaattccagtgtctcaggaggctgaggcagaagaatcggcttgaacccgggaggcggaggtcgcagtgagctgagattgcgccactgcactccaacctgggcaacaagagcaaaactccgtctcaaaaaaagaaaaagtaaaaagagaattatgtggggggacagtcagaccacaacaggacgtcttgctcacaaccgtactctcctgtccagcacagtaaatagcaggcggtgttcaaagattgtcattactctgagtcacacaggaagttttgggctttcaccccgtaaagcaatagtgactcaaactctacagcctgagaacgagcagcccaatccagggtactgggtgggcaggaggcgacagggtcaagttcaagctgtacacagagctgaacacatcatgggggtagaagatatttgttgttgacgtgtctgccttttctctaaggggatggtgagggaagccagtgggccagggcgtaggggcagtaggtctaggaatgagggctgaccctgctggcctcaccacacccctcctcctcagctggcgttgcagacggggcgtgaacccccacccatctggcgagtccagaaggcccttctgcagaaattcactccggagatcaaggacggccagaggcagttttgtgccaccagtaatgtaagcctgcaaaggggaccaaggacttgggggccccggggcgtggtatctaggagctggggttccccttagtgtggctgtgactcactccacagtgtatctggaagggggccccctgctgccggcaggctccaagcagctgccatggtggcccagggcacgggggtgttggccatctggctgggcagtgtgaagaatttcctcatgtgcctctttctccccatagtatttggggtattttggggatgcaaaaaatcggtaccagcgcctctatgtaaagttcctggaaaatgtcaataagaaggactacgtgagggtctgtgctcggaaaccctggcatcggcccccagtgccagtcaggtaccaaccatgggggacacaggggcaggtagtatgtagcgccgacaggcatggggatgcggcatgcaagagagaaggctggagagtggggggtggggacagagagaggagacagagcccagagagagagggggacagagacccggagagaaatagggacagagacccagagaaggggggatagagacccagagacaggaggggaacagagacccagaggtggggggacagagacccagagatgggagaacagagaaccagacgcatgagggagacggagactcagaaggagacagagacccagagaaaaagagggacagagatgggggaggacaaagatccagagacagggagacagagacccagagacgggaggggacagagactcacagaaggctacagagacctggggtggacagagacccagaaagagggggatagagacccagagagggaggggaatagagacccagagagggagggggtcagagacccagagagggagggggtcagagacccagagagggagggggtcagagtcccagagagggagggggtcagagtcccagagagggagggggtcagagtcccagagagggaggggaacagagaccagagagaggaggggacagtatgagagaagctattcctgtgcctagggcactgagcagggaccctgaggagaatttggattattgggggctgctgactacagtcccttctctgttcccttctagacgctctgggcaggccaagaaccccgtatctgctgggggtagctctgcacctccccctaaggccccagcaccacctcccaagcctgagacccctgaaaagacgacatctgagaagcccccagagcagactcctgagacggccatgcctgagccccctgcccccgagaagccctccctcctgcggcctgttgagaaggaaaaggagaaggagaaggtgacacgtggagagcggccattgcggggtgagcgggccaccagcggacggcagacacggccagagcggagtctcgccacgggacaacctgccacatcccggctgcccaaagcccggcctaccaaggtgaaggctgaaccgccccctaagaagaggaagaaatggctgaaggaggcaggcggcaacgctacagcaggcgggggcccaccaggcagctcctcggactcggagtcctcccctggagcccccagcgaggacggtgaggccctaggcagcctcagggctgcaggggtgggtggggaagggacacaggtgagggctgtccagagggctccaggtagccttggcaggacagtaagaaccagtatgttacagataatggcagtagctcacagtcacggggcatctcactacacgacaggctgcctcctgagaagctgatggatgttaacttgtgtaattttcacccatcctagtaggtagatactgttatcctcatctacagatgaggaagctgaggctccaagagagggcagcacagtctgtgttgggtgcccagcagagttgcaactgagcccagggtgcctcggactctgttcttcagtgctgcgttctgcctcataataggcaagatttgagggctgaggaagatgtgggactaggcagctgtcctggaggctctgtgatggtggggtttcctgtgaggccctgggtgaccctgagaaagaggcataacctcttgtgccttagtgacctcacctgtaaaatgggttcataatagacgaagctcataggagagtgccaatctttagtagacactacctgtctactccatgtctgcccagcacactgccacatcctcagtgcttatgatgatgtctggttaggccgggcacagtggctcgcgcctgtaatcccaacactttgggaggccaaggtgggcggatcagctgaggtcaggagttcaagaccagcctgaccaacatggtgaaatcccggctttactaaaaaatacaaaaattagcccagcatggtggcgtgtgcctgtaatcccagctactcaacgaggctgaggcaggagaatcacttgaacccgggaggcagaggttacggtgagctgagatcaggccactgcactccagcctagatgacagaacaagactccgtctcaaaaaaaaaaaaaaaagtctggttagtgatgacaataacaacaacaaaaataaatatatattcacatatgtacagtaagggtaacagctgatttttgttgagtgtttactatgtaccagaaatcattttaaacatttgcacacaggcttacttgacctttacctaataaaccccgtgagatagcttggtagaattatcctcattttaaagatgggggctgggtgtggtggctcgcaccggtaatcccttcactttgggaggctgaggtggtagactcacttgagctcaagagttcgagatgagcctgggcaacatagtgagaccccgtctctacgaacaaatttttaaaaattagctgggcttggtggtgaatgcctgtagtcccagctactcaggaggctgaggcagaaggatcacttgagcccatgagttcaaggctatggtgaggtatgattacaccactgctttccagccagggtgacagaattagaccctgtctctaaggataacttcttaaataaataaaagatgaagaaactgaggcaccaagaggtgatggtacctggtcagggccacacagtacaggggtagctgttttaacagagattagaattagcgagtcaaatgaggaaggcggaattgtctttccatcaaagccctgatatagcagggagatgtatagaaaataaaagcggccgggcacagtggctgatgcccagcactttgagaggccgaagcgggcaaatcaccttaggtcaggagctcgagaccagcctggtcaacatggagaaaccccgtctctactaaaaataaaaaaattagccgggtgtggtggtgcatgcctataatcacagcgactcgggaggcggagccaggagaatcacttgaacctgggaggcagaggttgcagtgagctgagattgcgccattgcattccagcctgggcaacagagggaaactcggtctcaataaatgaatgaacgaacgaatgaatgaatggctctttttcagggttgtccagggtcccagtttccttctctcttgttgaccggctgtttgccttgttgctggggtcatgacccctttccagtgagcccaagccctgtttctgcccctggccaccccacagaccttccccaacacccccaaatcccatcaagctctgtgtcctggcttccccatcttagggaccggacctctggctacacagtcacctgaccagacttcccaggagccatcctcacctcttttccttttcttttcttttttttttgagacagagcctcactctgtcacccaggttgaagtgcaaagtggtgtaatttcagttcactgaaacctccacctcctgggttcaagtgatcctccttcttcagcctcccaagtagctgggactatagatgtgtgccaccatgcccggctaatttgtgtatttttagtagagatgaggtttcaccatgttggcccaggatggtctcgaactcctgacctcaggcgatcctctcgcctcagtctcacaaagtgctgggatcacaggcatgagccactgcacccggccttcctcttttctttttctacctgtcgcccccacagctgggcagctcccagccctgtccgcccccatcccctccaccctttcccaggcctgcccagctcagcctcgtcctctgcttccagccctgccccaccttcattcgttcctacctggtccatcagcctggacttcagcctcactcctccagtctgtcccctgcttggcttaggagggatctttctacgcttacactcaccccttccctgctctcagctctctcatggctccctagtacccaccagaaaaagcccttgccctttctgcctggtgttggaggcccagtgtggtctggcctgcactgacctgtgcaatgccagctcccatctcgtccctcagccttgcccctttatgatctgacctccctggataccctcttttggaaaccaacaatgctgctgctttagacttacgtgaagccacaattaagtgctctgagctatcactcaaggc[132 bp omitted]ctcaccgcaacctctgcctcccgggttcaagcgattctcctgcctcagcctcccgagtcgctgtgattacaggcacgcaccaccacacccggctaattttgtatttttagtagagacagggtttctccatgttggtcaggctggtctcgaactcccgacctcaggtgatccacttgccttggcctcccaaagtggtgggattacaggtgtgagccaccatgcccagccctttttttttttttttttttttttgagacggagtttcgctcttgttgtccaggctggggtacaattgtgcgatctcggctcaccgcaacctccgcctcccaggttcaagggattctcctgcctcagcctcccgagtggctgggattacaggcatgcaccaccatgcccggctaattttgtatttcttagtagagacggggtttctccatgttggtcaggctggtctccaattcccgacctcaggtgatctgcctgcctcggcctcccaaagtgctgggattgcaggccacagcactttatgggctacaatgcctggctttttttttttttttttttttttttggagacgagtttcactctgtcacccaggctgtgcaatggcacaatcttggctcactgcaacctccgcctcctgggttcaagccgtcctacctcagccttccgagtagctgggattacaggcgtgtgccaccacgcctggataatttttgtatttttagtagagacagggttttgccacgctggccaggctggtatcaaactcctgaccttaggtgatctgcctcggcctcccaaagtgctgggatgacaggcgtgagccactgtgcctggccttctctgagcttcttgcagtccctgtgattctgccacaagagcacgtggcactggcgcttgcctgtcaatcttccctagcggacttggacctcccaaaagcagggatttctcttccggtccccagtgttgagaacagtgtctgccacacaggtggtctcagaggaaattgggataacgagcctgcgtcctgtcttttctgcagagcgggcagtacctgggcgtctgctcaaaaccagggcgatgcgggagatgtaccggagctacgtggagatgttggtgagcacagcacttgacccagacatgatccaggccctggaggacacgcatggtgagctgaggcctggggaggaggggggggggctgactcggtctgagggagcaggtgctgagggcttggacgtgatgtgagagaggagaggtttggggtcgggactcctgagtctgagggaagaggagctgaggcctggacctgggtctgagagaggaggggctggggcctggagtcctgggtctgagggaggaggtccctgggtcctagggagaagaggctgggggcctggactcctgggtctgagggagaagaggctgggggcctggactcctgggtctgagggaggaagggctgggggcctggactcctgggtctgagggaggaggggctgggggcctggactcctgggtttgagggaggaggcgctgggggcctagactcctggttctgagggaggagaggctggacctggactcccaggtctgaggaaggagggactggactcccgggtctgaggaaggagggactggggcctggactcctgggtctgagggaggagggactggggcctggactcctgggtctgagggaggaggggctggggtctggactcctgggtctgagggaggaggggctggggcctggactcctgggtctgagggaggagggactggggcctggactcctgggtctgagggaggaggggctgggggtcgagggcctgggggtctggactcctgggtctgagggaggaggggctggggcctggactcctgggtctgagggaggaggggctgggggtctggactcttgggtcagagagaggaggggctgggggtctggactcctgggtctgagggaggagcggctgggggtctggactcctgggtctgagggaggagcggctgggggtctggactcctgggtctgagggaggagggagctggggcctggactcctgggtccgaaggaggagggggctggggcctgtacttttgtctctgagtgggaaggggatttggggacccagactccatgaccccaccttggccccagtgctttgtgaggctgtggccttcctgataccatgtcctcgtccatcagacgagctgtacctgccccccatgcggaagatagacggcctgctgaatgagcacaagaagaaagtcctgaagcggctgtcgctaagcccagccctgcaggtgcctgggggtctgggcagggggtgtctggggcccagggtccacatggagaagacatgtacgtgtcggccgctgttggcgggggtgatccttggaaggagatcgtccttctgggctcagatgggagaaaagttgagggcaggactgtcaggagatctctgggttctcaacagccatgaagcccatgtggggaggagctgtgggccttggggcagcagaggggtggttgtgaaaggctgggctgttgtttcggagaacaagtgtgcagccaaacatagactaggcctgcacccaaagcgggcactggaccgatggcttctttgtgagtccaatgcaggctattaggatcccaggcttcagtgttaagtcatctgtatgatttcccttctgggatattctgggatggaatatcagggctctgaaatccagtgttaaactggctctgaggattctggttgggatgttagtgtggcactgagaattccgggatagaatgttagggtaactgagacttctggaatcgaatgttattctggctttgagaattctggaagacttgcagtgattctgagaattctgggatggattctaggctggtactaagaattctgggataggctattaggctggtgctgagatggctggtgggaagttagtcttagaaaatacgcaggaaggccgggcacagtggctcacgcctgtgatcctagcactttgggaagccaaggccggtagatggcctgaggtcaagagttcgagaccaccctggctctctcaaaataaaaaaaagtgaaaccccgtctctactcaaaataaaaaattagctgggcgtggtggtgggcacctgtagtcttagcttccctggaggctgaggcaggagaatcagttgaacccaggaggtggagcttgcagtgagccaagatggtaccactgcactccagcctgggcgacagagcaagactgtctccaaaaaagaaaaaaaaaacaggccag[134 bp omitted]ggcgtggtggcgggcgcctgtagtcccagctactcaggaggctgaggca[153 bp omitted]gagagaaagagagagagagagagatattaatatgactgagaattttgagtgagatagtagttttctcagaatgatgggtgggacgttgggatgaccgagaattctggaatggattcttagactggtgtggagaaatctaagctggaatgttatgctgactctgaaaattcgtgggtagagtgctgggtgggttggaaaattctgggtagcattaggttataaaaactctggaggatatgaatctagtctacaaattctgagatggattgttaggctggcactgaggattgtgggtgagatgttacactagggtagataatcccagtgtaggatattagagtaggtctgagaagtatgtgttattagtcgggagttagaattctgggatagatggctgggcgcggaggctcatgttggtaatcccagcactctaggaggctaagggaggtggatcacgaggtcaggagaccaataacaacccatcctggctaacatggtgaaaccccgtctctactaaaaatacacaaaaaattagccgggtgtggtggtgggtgcctgtagtcccagctactcgcgaggctga[140 bp omitted]gatagggctgagaattctgggatagatggttaggatggggccaataattctgggatagatggttaggatggggccgagaattctggggtaggtggttaggatggggccgagaattctggggtagatggttaggatggggctgggaattctgggatagctggttaggatggggctgggaattctggggtaggtggttaggatggggctgggaattctgggatagctggttaggatggggctgggaattctggggtaggtggttaggatggggctgggaattctggggtgggtggttaggatggggccaggaattctggggtgggtggttaggatgagaccgagaattctggggtaggtggttaggatgggactgagaattctgaggtaggtggttaggatggggccaagaattctggggtaggtggttaggatgggaccgagaattctggggtaggtggttaggatgggaccgagaattctggggtaggtggttacgatggggctgagaattctgggataggataggtggttaggatgagactgagaattctggggtaggtggttaggatggggccgagcattcagggataggtggttaggatggggctgagaattctggggtaggtggttaggatggtgctgagaattctggggtaggtggttaggatggtgctgagaattctgggataggtggttaggatggggctgagaattctgggatagatagttaggatggggctgagaattctggggtaggtggttaggatggtgctgaaaattttggggtaggtggttaggatggggctgggaattctggggtaggtggttaggatggggctgagaattctgggatagatggttaggatggggctgggaattctgggatagatggttaggatggggctgggaattctggggtagatggttaggatggggctgggaattctggggtagaattttgggtgacattgagaatctgagccaggccagaaggcacagtggaagcatcactggtcaggcccagcctcctctgtcctttgaggagactctagttgtctctcctgatctgcagcctgggggaaactgaggcacagatctgagacctggctgttgggtttggggtttatggatccagggcagcatccagctgacccattggcttcccgcaggatgctctgcacacgttcccacagctgcaagtggagcagagtggggagggctctccggaagagggggctgtgcggctgcggcctgctggggaaccctacaaccgcaagacgctcagcaagctcaagaggagcgtggtcagagcccaggtgggcactggggctggggctgggagtggggagtgctggcggtatgtgggaagggaggagaggggctgccaagtgccgggctggaggggctgaggcatctccactcctacccaggagttcaaggttgagctggaaaagtcgggatactatacactctaccattcgctccaccactataaataccacaccttcctgcgctgccgggaccaggtgagccccacccacagcacccatcgccctgggattccaacctttctgacttcctcttgggatctgagggtccaagcccagccccatcctgcctcagacccaagagttcaggtccttctgtcttggacttaagaatgcagcccccagccctggtctccctgggacactgacatctgacaccccaggccccatgccccagccccttccctccccagaggccggtgtgccaccctccccagtgccatgtttgacccctgcagaccctggccatcgagggcggcgccgaggacctgggccaggaggaggtggtccagcagtgcatgcggaaccagccgtggctggaacagctctttgactccttcagtgacctgctggcccaagcacaggcccacagccgctgcgggtgaccccgccccagcttgtgaggggggcgcctcctccatgaaccgagaattgggacagaaccgtgtcctcaggagctaacacctgggctccatcgccggggaaagggggtcatgggtcagggtgtgtctgtgctgccccctccagggcagggttcaaagtccgactccccccctctcccaagccccctccactccctccccattcctcccactgttcggtgtacagagaaattatttatatatatgtataaatgtctatttagtaacggtttccctctccccttgccccgaccccccctccacagccacagcccccgccccctccaccttgtacataatgtataggaaaagtctatgtatggctggggggggtggggtggcttcagagagctgggggaccccttccccccaagtcccccctgcaggccaagatctttgctaaaggccattccctccgcagggcatttggcgtcgggtgggaggggaaaacgcatcttgttaattatttttaatcttatttattgtacatacctggggcaggggcttggggaggtggaggggggagaagggtcccctctctctgcccctcccactccttttctacggcgatttgtctgtgtctggcccccacccactgcccatcccccattgttgtctggatgtggttctattttttatcggtctcctttcccctcctccccgttctcgcccccgccccaccccctgctcccactaccctttgtctcttgctctttcttgggcttctgtacaactcaacttgtatacactgtgtacacacaaccagccaaacgaaaacccaacggcaaacactttaccggcaggctggagtgcctctgtcctgcggcgctggagtgggtggcagtggtagcaggggcagaggttctggaacgggactttcccagagccctgggcagtggggggcctgaggctggcatatgttctgtgtccccgcacagcagagtatcccaccctgaaatttaatgacttcagacaacaaatatttatcactggggggtttcttttgttttttagctaaagacagggtctcgctctgtcacctaggctggagtgcagtggcatgatcatagctcactgcagcctccaactccctggctcaagcgatcctcctgcctcagcctcccaaagtgacgggattacaggcaagtgccactgtgcctggccctgtgttctttatgttacccaggctggccttgaacttctgggcttaaaagatcctcctgccccagtctcaagtagttggcatta[132 bp omitted]ccccggttcaagcgattctcctgcctcagcctcccaagtagctgggattacaggggcctaccactacatccagcaaatttttgtatttttagtagaaaccaggtttcaccatgtcggccaggctggtctcgaactcctgacctcaagtgatccgccagcctcagccttccaaagagattacaggtgtgagccactgcgcccggcctcaagtcctgtattcttgaatccaagtgagtggtccatggtacagcactcttggagttccccaagcacttgtataaatgtagaatcggcacaggcagcagacgaggagagggcaggttgaatagggctgtttctcctcctcccacccttaaaggaaaagatgtagaatctcaggctgttgctctggtctacttgatcagaacccactttttagtaaaatgccgagaggattctcaagcacattcaagtttgaagaaccgtgttctagaacaagaatgttaaaaatgtgcaggttggctgggcacggtggctcacggctataatcccagcactgtgggaggccg[134 bp omitted]gaggctgaggcaggagaatcgcttgaatccagggggcggaggttgcagtgagttgagatcgtgccattgcaccactccagcctggctgacagagcgagactccatctcaaaaaataaaaaatgtggaggtcaactggcaatattttagaacccagtctatgaagcagtgaacaggctgttgtcattctagagcctggatggatggaccactggtgttccagaaccctggcttagtccgtgggtagggacccagtgtgagatttgagggtggaacatcagcattccagatgcccttttaggtgagattcagggagaaccctcatcgttctagaaccttgagtattgttccaggggtgtccaaggagagaatacagtcatgggttcttagtttctgttgtaccagtaaagccccttcctcatccctcttttttgtttattactagagacagaaactaaaaaccatggcttcaggctgctaaaagcctaaaacaaaacagaacaacaacaaaataaggtgggttggacaaatctggactctagaccatcacatgttacagatttttttttttttttttttttttttgacggaatctcgatctgttgcccaggctggagtgcagtggcgcaatctcggctcactgcaagctccgcgtccagggttcctgccattctcctgcctcagcctcccaagtagctgggactacaggcgcccaccaccatgcccgactaatttttttttttttgtatttttagtagagatggggtt[133 bp omitted]gactagaggatggatagtagcatttgagaaccataatgggtgagtcaacaatagaccatgaagccaggcgtggtggctcacggttgtaatcccagcactttgggaggtggagatgagcggatcacctgaggtcaggagtttgagaccggcctggccagcatggtaaaaaccttcttttttttttttttgagacggagtctccctctgtttcccaggctggagtgcagtggcactatcttgactcactgcaacctccgcctcccaagttcaagcgattgtcctgcctctgccttgtgagtagctgggataacaggtgcatgccaccactcccggctaatttttgtatttttagtagagacagggtttcaccatgttgatcaggctggtctcgaactcctgacctcatgatctgcccttcttggcctcccaaagtgctgggattacaggcatgagccactgtgcccagccaaccctatctctcttaaaattacagaaattagccaggcatagtggcttgtgcctg[142 bp omitted]ctagaatcattgagttaagagggctgagtacaaaccattattgtgcttgaactgtggcctatagcatgtgggggtgcagcctttgatggaaagccatacattcaaggtcctggactagactgtcaaactgaggccaaatgccaggtgacagtggctcatgcctataatcccagcactctgggaggccaaggcaggaggattgcttgagtccagcctgggcaacatggcgagatcctcatgtctccagaaaaaaaaaaaagctaaaattgaggccaaaggattggcattgtcccaggtcagagttccaggatggaaaacgggtggagtattctttttcttttttctttttgagacagagtctcgctttgttacccaagcttgggtgcagtggcatgatcttggctcactgcaacctccgcctcctgggttcaagccattcttctgcctcaagcttcctgagtaactgggactacaggcacgtgccaccaggtccaattaatttttgtgtttttagtagtgacgggatttcaccatgttggccaggatggtctctaactcctgatctcaggtactccacccgccctggcctcccaaagtgctgggattgattagaggtatgagccaccgcgctcggccgggagtggagtgttgtgagcgtggacagtgaggtcaggaatcatccctttagggacagaatcaccttgtggttggcctttggcatccagctgcccagattagaatcccagctgcagcactaaccaggcagattgggtaacagaccccatcttcacctttgccatccattaaatgggcttttgtcaaaatgaaggaagacaaccggtttggagcacctggcctgcagctcctgtgacctgtagcaggagatctagagaagcttaacagaggtccacaacatgacagaaaacaaagagacacagagaaagataaagatggggacattggccgggcgtggtggctcacacctgtaatcccagcactttgggaggccaacgtggatggatcacctgaggtcaggatttcgagaccagcctggccagcatggtgaaaccctgcctctactaaaaatacaaaaatttgtcgggtatggccgggcacagtggcttatgcctgtaatcccagcaaattgggaggccaaggtgggacgatcatctgaggtcggaagttcaagaccagcctgaccaacatggagaaaccccgtctctactgaaaatacaaaatcagccggggtggtgcgcatgcctgtaatcccagctactcaggaggctgaggcaggagaatcgcttgaacccgggaggcggaggttgcggtgagccgagatcgcgccattgcactgcagcctgggcaacaagagtgaaacactgtctcaaaaaaaaaaaaaaaaaaaaatttagtcgggcatgcttgccggtgcctgtcatcccagctacttgggaggctgaggcagaagaattgcttgagtctgggagatggaagttgcagtgagccaagatcacgccactgcactccagcctgagcggcagagtgagactccgtcttgaaaaaaaaaaaaaaagatggggacatcaaaacctggaaagctttagaatcgttgctagggcctgccagagctcaggggaggggaggaaccgaatacataatttctggcactaacagtacctagggagatgccagcctttttgctgttgtgtgttgatctttgggacactggtggctgtaaaccttccaaaaatggtctgccagttgtcttgagcatttggggggcaagcggtaactttaatcaccttctcaaagtgcatcttggtcctactagaagcagggtgccccagccaagaagttggccccatcgggcagtgcaggaaagactctgatcctctgcagggggcatgtggatggtgagatctgggaagagagatgttggcacaggactccttcctgttgggggctcagtacccgcagctggggcttaggtggaagtgtcagagcttgtttggaaactgatcaaaacattgcccaccctcttgccccaccactccccatccagcaggggtggacccctggtgtgcagagttcctagcagggaagagagccaacatgtgacagtacatccgagctgtactttttcccagggcagaaggttgagaacagg[135 bp omitted]gcaacctctgcctcccgagttcaagcgattctcatgcctcaccctcccaagtagctgggattacaggcgcccgccaccacacccggctaatttttgtagttttagtagagaggggggtttcaccatgttggc[131 bp omitted]catggttctggggcagaatggagacatgtcagccacagtcattgatggtgagcacttagtatgcgccgggctcattcctcctctgcaatcgtctcctttagtctcgtgctcaccctgtgaagtagctttgtacttacccccattttacagatgagactgaggtggcagagctggatttgaattcaggcatcccggtcacgcaaaggccatgctccaccctaggactaggaagcaggttccagggtgggtgcgagtagagcattcagggatcaggggcctgggtatagggagcagatgtttgactgctgataggtttcaggtggagcctcaagttcagggcatcgggacatctcggttgaggtgttttgttttgtttttgttttttttgagatggactctcgctctgtcgtccaggctagagtgcagtggcgcaatctcggctcactgcaactccacctcctgggttcacaccattcttctgcctc[133 bp omitted]cagcctcccaaagtgctgggattacaagcatgagccaccgcgcccggccggttgaggtttttagcctggtgtgttgggtagatttggggctttaaagatggccggtcacacaggcttgggaggtgggtggacagtggtctccagttggcttcagccttccagggtagcaaatagtgggcaggactgctcctcccccaaccagagcttaggttggatgtgggagagtcctaagtgtccccaggctgggcatggtggatcatgcctgtaaatcccagagctttgggaggccgaggcaggaggattgcttaaagggaggagttcaagaccagcctgggccacatagcgagaccccatctctacaacaaaatgaaaaattagccaagtgtgcactcgtagtcccagctacttgggaggctgaggcaggaggattgcttgagcccaggaggttgaggctacagagttgtgatcacgcgactgcactccagcctgggcaacacagtgacaccctgtctcaaataaataaataaaatgtaaaaaacgaagtgttcctaggacacagatgggctttgggtatccagactgaagtgtgtcatccatttacccactgtggccttaagacacccaacacttctgcttctcccaggacagaatagggggttggatgggggatgtccacactgaccccaaattggattaagtgtttagattcagatttcagtgctactgggaactttctgaaaatgaggacttgccagacggctgcttggacaccattccacccacctgtcccttctcgatatacattgaaggtgagagtgggacaggcagggtttgtagcagttgctccctgtctctatttttgtagacagagtctagctcttgcccaggctggtctcaaactcctggcctcaagtgatccacccatttcggtctcccaaagtactgggcttacaagcgtgagctaccacacccagctgagttgctgcctgtctccaatgtcctagaacgttctattggaatgttctagaaagcactatccaatagcccactcagcaatgataggaatgttgtctatctgccctatctattaagatagccactagaggctgggtgcggtggctcacgcctgtaatcccagccctttgggaggccgaggtgggcagatcacttgaggccaggagttccagaccagtctggccaacgtggcgaaaccccgtctctaccaaaaatacaaaaattagccgggcatggtggcatgcgcctgtagtcccaggtactcaggaggttgaggcaggagaatcacttgagcccaggaaacagaggttgcagcaactggagatcctgccactgcactccagcctgggtgacagagcgagactcttgtctaaaaaaaaaaaaagtcactagccacatgtgacaactgaggtcttgaaatgttgatttgactgaggaactaagttttattaaaatattttttattttgttgttgttgttgtatttgagacggagtctcgctctgttgcacaggctagagtgcaatggcacaatctcggctctctgcaaactccacctcccgggttcaagctattctcatgtctcagcctcctgagaagctgggattacaggcgcccaccaatgcgcccggctaattttcgtatttttaatagagacagggtttcaccat[136 bp omitted]ttgagacagtcttgctgtcgcccaggctggagtacagtggcatcaccttggctcactgcaatttctgtctcccaggctcaagcgatcctcctacctcagcctcctgagtagctgggactacaggcatgtgccaccacacccagctaatttttgtatttttggtagagatgggggcgggggggggtctcactttattgcccaggctggtctcgaactcctgagattaagcgatctgcccacctcagcctcccaaaatgctgggattacaggcataacccactgcatccagccaaattttatttaattttaatttaaatagccacatgtagcttctgcctaccatattgaagagcgcattctataactttctaggaaaaaaaattccttcatcagatgttcaaagtttatcccaagaaaatacccataaggtcaagagattgagaccatcctggctaacatggtaaaaccccgcctctactaaaaatacaaaaaataaattagctgggggcgtggtggcatgcgcctgtagtcccagctactcgggaggctgaggcaggagaatggcatgaacccaagaggcggaggttgcagtgagctgagatcacaccactgcactctagcctggctacagagtgagactccatctcagaaaaacacacacacacacacacacacaaacagaaaagggtagaatcgccctgttgaagggaaagtggggggtctaggcacttggttatgctttataaacttcttctgctcctccccaagcaataggttctagatgcgagggttctaggtggagggaggccttagaacatgtgtgccctgaattcgttcaccttcccagagttcattcccccaccctttttttttaagagatgggggtctcgctatgctgcccaggctggtcaaaaactcctggactcaagcggtcctcccgcattggcctcccaaaatgctgcgattacaggagtgagccacagtgcccgaccctcattacctttttagaaagcacctcctgacgttggcagtgacatttatttttctgggggaggggagttatatacagcagtgacccggagcccctcacccccaccaggcttaggtggggacaggaggcgttggcagaaggcacacagtggcagtagcccagaagaggccaggaagtaagggtgggtatgtgatgtgtcctgggagacccagatgaggaaattgaggctcagtgagggcctcaggtcacacagcaaggtgcgaaggcagctagtcccgagagcttgtggtggttgcttctctcttgcctgggctacaggaggacgcaggggcagcccccgcccttcttcctgggggcactgggagggctcggtgggagctcttgttcctggtatttcctgtgggaaaacgccagtgagtttggagtggaagggctggggacaaggacgacaggaaggggacttggctcaccggacagcccgcaccagctgctcaaaagcctcgtccacgttgagacgcagtttggccgaggcctcaaagtaggccacgtggtgggaggcgccgaaggcagaggcttctgatcgggggacctgggggtaggggggacacgggggagtcaggtccctgcactcagggtgaccgcagccagagagacagacaggcaggctggatactctaggagaggtgacccactgtgagaactcaaagaggaagagctcctgagagattatggagggagatgccgcaggggcttggtgtcttctaagtaagggatgggggcaggcttcgtgggcacttgccctgctatgccttagataaccaggagtgggcaggcagggaagtcagggtgttcccggcagaggcaggcggaaccccaaagcctggaaatccccagagcctttgccagatggatgagttctgtgtggaaatcgttgtgggggaagtgatgggagcagggaaaggaggggcgcaactgtgcggggcatctggcacctggggaggaactggggagccatggagggggccggccatgagcaggggaggtgctggggctggtgggaggttggctggaagggaggaatgcgaggaaggggcaaagagagctggcggacggggggtgaatgtcctttgttccgtccagcagcctctcctgaggacacttgcatgctaggccctctgctcggtgatgccggggaccctgaaggtccagtttgggggtaacccatctaggtgagctgtgtgacagtggcagtcgcagcactgcaggaacagaggaggatgctgatgggggacaggtgtgctggaaggagcctcccagactgagatggggtccccagaaagaggggtgtcccgaacctggcgctgtgactccagatctgccttgttcccgaccaacacaacggggaagtcgtcgcggtccttgacccgcagaatctgcgtgaagagcttgcccacctcgttgaaactgcgagtgaagccggaggcatgaggtccagccagctgcagagcccaggtcctccccacacccacccactgctccgccaccagcaacccctgtcacctctgccggtcgttaatggcgaacaccagcaggaagccgtggccagcacgcatgtactgctctctcatggccccgaactcttcctggcccgcggtgtccaggactgcagagacagggagaggggccatcgtggggaccaggctccccgcagtcacccccaagagccctcagcccccactgacaccacccccatccatcatccatccttgccgccctcactgtccagccgggctgggatgccatccacactgcagatcttcgtgtaggagtcctcaatagtggggtcgtagtcagacacgaagtaggactggcggggtggggagaggatagttactgcagtgccccggcagacaggacgaagccctgcccttgggatgcctctctcagtctctgtccctctctctctaaatgtctgtccctgttgctgggtctctgcccccttttctctgggtctctgtcccgtctgtctctctgagtcttttttttttttttttttttttgagacggagtttcgctcttgttgcacaggctggagtgcaatggcgagatctcggctcactgcaacctccgcctcctgggttcaagagattctcctgcctcagcctcccaagtagctgggattacaggcatgcgccaccacacctggctaattttgtatttttagtagagatgtgttggtcaggctgtgttggtcaggctggtctcgaactcctgacctcaggtgatccgcccgcctgggtctcccaaagtgctgggattacagatgtgagccactgcgccctgccctgtccttctctctctctccagatgtctgtccttgttgctgggtctctgcccccttttctctgggtctctgtcccctctgtctctctgagtctctattactctctctctctgggtctctgtccccttctctttgggtagctgctcccctgcccccctttccctgccccccacccctcctaccagtcttcttctctctgagtcactcctggtcctctctttctggtataaggtacatgtcccacatcgtgattacatcctagctgtgtgacactgaacaaatcacttcccctctctgagcctcagtttcctcatttgaaaaaggaggctaagaacagcactacactccatccagcactggcaagattcggagcaaaaccccattaaatattgaatgtatcagttatcggaggcgttgttgtccagactgcctgtttatatctctccctcctcttctgcttcctccctctcttcctcctcccccgtctcctcctcccccgtctccttctcctgctcaggcggcctccagcgtctcctcccaggggaaggtcccggttccaatccggctgcggagaggctgccccaccctcgggccccagcccctcccttcctgcctgggtcctgcccgctgccagccaagcctttggccagctctgggactgcctctgggtgcaaggggcccagggctggggcctttctctacacaagcagggcttcctcccaggcccttgaaggggtctcttggtgggggtgaggggggtgtcctggggccccggggcctctgcggtagcatgtcaggccaagacacttttctaggatttctttgaagctgggaggacctccctcaggaatggggaggaggtttcctgggctggggtggaatttcaggaaagggggtgatgtggaggctaggggtctgaaggctgcatctgtcggttagaggggtgcttggtgaggggcttgtcctggagggaggctgtaaggatcaagccctgggagggattgtggctctgggggtagttaggggcgtgacctcagagcacagcgtgagaagctcagggctgagaactgggagccagcccggaggtggctcaggggttttgggaggttatagtatatacagtcttagaaacattgagttcatttatggggtcagagaaactcccaaggaatagatctttctgggggtgccaagaatctgggggcttcttccatggagatgatttgagagctattcagggtttctgagaggggctcagggagttgcagcggagaaagcatgggatggaggaggggctggttttccttgggggtggggtgggagagtggaggtttgggcctccgggaatgggggattgtcaggacttggggtcttggagatttctggaatggccaaggggcaggatgtctttttaaatctcgggtcggagagcaggactctcttaggactgggtagtcccagaagagtctcagggccagggtctgggtagaatttctagattctgggggcagtcatggaaggggctaagaatcaaacgtggggccgggcacggtggctcatgcctgtaatcccagcactttgggagtccaaggcaggccgatcacgaggtcaggagttcgagaccagtccaatatggtgaaaccccgtctctactaaaaaatacaaaaattagccaggcatggtggcactcgcctgtagtctcagctacttgggaggctgaggcaggagaattgcttgaatccaggaggcagaggttgcagtgagccaacatcgcaccactgcactccaccgcactccagcctgggtgacagagtgagtgagactctgtctcaaaaaaaaaaaaaaagaaaaaaaagaatcgaacgtggtggaatctcaaaggtgctgggcactggcattctcccaggaaggctctcaatggcttagaggggaagttggggactgggatttgggggagatagggctcagggtggtggaaggtggcaccaagggcgtggtgggggtcctgggagtgcttagggtccgaatggggtgagtattttgtatttagcatgctcccaggaggtgctcaaagccaggtcagcaggtaagcggggtcttaggcactgggagagggaatagtgggtctcgggatgcgagtgcagaaggaagggtcccccgtgcaggggatggaggctctccaagagtttaggttacaatctgtggggatcttttaagattagagggccttataggagggtctcagtgatgggtcaagggggaaaaggggtctcggggatccccccaagggctcagttctgggtcccgggggacaccctcccgggtgagggcccactacctggatgaactggatggtcagcgcgctcttgcccacgccgccgccgcccacgaccaccagcttgtgtgtctcgctgggcggggggtccccgggcccaggtcccccgccccggggccgcccccgccctgtcccggacgccgccccgctgctcatgtcgccaccgctgctgctgccttcgctaccgcctgcgggggagccgggcgggacccgggggggcgggctacgctaatgaggctactgcataatcatgagctctggcaaggagggctcgcgtctccggacacttaaggagggggacgggccaaagaaagggaggagctatgttaataagggaaagggaacggcgttcgctgcgaaggggaattccgaatgaggcggggctatgctaatgagagacctgtgctttgccctgagcggcgccacgcgctctcagcgggagggcggtctgtgggcgtggctatgctaataagaatttattctttcagcagacggggcggaaagttcctcaggggaggggctatgcaaataaggacccctgtgacactgctgcttggggcatcgtctccgaggccttagtatggtaggcggagctcgtcgactcgcgcgcgcggccgtatatagggcgctccgaggaagcagcaggttttgaggagtagctccacctccctcctgggatcctagccaagctttcgaccccggcgtctgggttagaagctagagtctccgcccgctaagggacccaggcttccggttcccgctgtcccagccaagcggaagacagactgggaggagagtggggccctagagggggacagcagggtaacggggcagggaggggccgtgagatcactgcattcctaatccatgagccagctcgcccaagtagggatgcctgggtcatgaagagcctggggccaggatttctgggtcttgaaggagaaggaagcagagggcccagactcctgggtccttaggagaaaatggggctggagatgtggactcctgggtcctggggaggagggtgtcagggaggaaggtagacaggttccttcgtactaggttcggtaaaggagggagccgggggcctggactcttaggtccaggaattggagaggctggggacccaggattctggatccgagcgagggcactggcttggggggacccgaattcgtatgtgagagcttgagaccaggactagtctgggagaccgactcttggatccgaggaaggaagaatcagactcctgagtcggagggaggagggaaataggagtctggacactgctctgagtgagaggattcggaattcagacttctctgtactgaacgaggcggctatggggtcgggcttctaggttctaagtttatttttatttgtttatttttgagacggagtttccgtcttgtagcccatgctggagtgcaatggcgcgatcttggcccactgcaacctccgcttcccgggttcaagcgattctcctacctcagcctcccgagtagctgggattacaggcgttagccaccacgccaggctaatttttgtatttttagtagagactgggtttcaccatgttggtcaggctggtcttgaactcctgatatcagatgatccgcctgcttcggcctcccaaagtgctgggattacagacgtgagccaccgcgcctggcctatttttatttttttagaggcggggtctccctatattgcctaggctggcttctaacttctaggctcaagccatccttccgcctcagtctcccgagtgggactacggtgtgcgccactgcatcccgtctggttctaaatttaggggggcctagaggatctggattctgagagccccagaatgtgggcagcacaacatccagcaagtcgtgctcactccgccggactacaattcccttgcgtctgttctgcctggcgcctcttacgtcacctcctgttccgccaccctttccgcgcgcgcgcagggcactgtggggcgtcatcgcgggctaccgcggccccgcccacttcacctctcaccccattagctgtccccgcgcgacagaggcggtgcgcggactacgcctcccggcgtgcatcgcgcggaccccgccccatgtgtcccattggcttctgggaaaccgagtgcggttgccttcccgccggccttcacgtcgccgtgctcggtacttgaaatcccggcaagctcggcggcgctttagctccgcctctctcctcctttgctcacgaaccccgccccagcccgccccgccccgcgccggggccggagccgcagcccgagcggcggggtaagatggcggcggcagtccgggccgcggggctcgggcctattggggtgggcggggcggagttgggtcgctagttgtcccggggtcctccccacaagccacgggtcctagagggcttctcggggcggtctcgggcccggcagctgcggcgaaacctggcgccgagaggggggccttctcagggccccgggacgcatccgtgggttcctgggggcgtctatggggcgtctccgagaggacttggggcgtctctgggcctagaccgagcctaaggcctgccctccatcacacagctggcctggatcgtgtctgtagacactgtagattgtctttttgggctgaccggaggctagggtctggttagagggttctggggccatcttgagatcttgagatatgtcccaggggtgaaggagggtctgcaagacctgaagagtatcttcagagccatctagaggcctggggtatgtcttttagggctggaaagtgtctgcatgggctggcctgaggatgcaactggtctgcataagtctggggccatttatcaggcctagaaggagtgttcaagggctaagaagtcatttagggccccctagggggttgggttatgcccaccagggaagggcgccaaatattgagatgtactgagggtctggggtctccaaggtatgggtagtgtctaataatgggtgacaggaggctgggggcagttagaaggacctggaaccatctagatggctttaatgtgactgcaggaatgcagttttgatgcctggagcaaattcgaatgcctttggggtcagagcagcttgtggcgaataataatacggaaagagaatgaggaaattttgcccagcttagatatacttgcccttcagacagtaattcaaatgaaaaatgttttaagattctgcattaccctgggggttattgagagagttagaattaatctacattagtctggaagagtctggagggtcatctagacccactattacagtgcttttcaaggggaaacctgggccatgttgaccgtgatctgcattaagatacattttttcattgagacctggtacagacagtcataatgtatttaacattatataacataatgtattaacattaactcaccttccacgaattgacatttccacttactacttgtgctgtgctgtgaagaactattttgttctatttactttttaaaacaagctatttgtgaagcactaaactggtatatgaccctgttgttggggaaaccactgatccagataggacctagcagtatctgcagagcattcttctgttcagaagatctcagtagctgagggtgtgtctgcgaagcctggtgctttctaaatgagcaagcaagcatctttgtatactgcagagggtttggggatccctcagcctgtagtcagcagatgttgattaagcttctgatatgtgacagtcactgttgtaggtagcatgtgcttccccgggaggtgctggagagcagttccagggccaggaactggggctgagcttattgagtattggtgaaagaggctgggatgtaatagactatcagggttgggtgtgtcttaggaagttaggaattaggtggagctgggaggctgaatatggaggcttggcatggtttgaaaatctatatgggatctagaacaggaccagggccttgtctttgcaggcatgctgtgggggaagcgaggagacagatgtaggggaaacctgggcgttaagggctaatagtgtcattcctcttcatccgtattgagcacttgaggtgctctaaatgtgtggcagaagtcaggctttgagtattcacagccattctctgagatagatgctcctatttcgtgcatttacaattaagcatactgagttgtgggttagggattttgaagctttctaggaattttgagattggatattgtcttatgagtagcagatttgacagtcatggggaagcttacagctgaaatattcatatttttctgaagccctaatcaagacatccacctgtttgatggatgatctttcaactgcctgactggggaatcatatcaaagaatttccatgacattgcaaaggctttgtgcagatggcgataggtaaatgcctcctgtgaagttttccttcggcatgtctttctgaagtttagcgttttcattttaaaaatggcatactggttttgcagatcactcaatgaagtttccaacttaggtgtataaatacaatttgggggtggtcctcaccatcgaggacagttgatgctctaggaagccgtgtggtgtttaaggcatggtgttgaatattgcccagcacattggccttgggaaaggtgggtttataggactgtggaacacaccctttgaaatcacagtgcagcacacacaaaaaaccttggtgttggctttgcctcttaggaggccagggaatgaggtcttgaagtttggataggttgttggggaagctgcgggaattgaggagtgagatgttaaaagcggaggccagggaggcctccctttgacataagaggcacctgagacccagaaaaaaggaagagaattgctcctagtccctggggtgtctgtgctgggtccagcgcccacccaagcacagggtggagtgggaggaggtggaggagaggaggggtgccagaggggatgctgagggagatagtgtggggcccttgaggtcttcatgtctatcctctacttccatcctttctcccgggacctccactccaaactctcccccctggacccccaggtgaccatggaggaagaagatgagtctcgagggaagacagaggagtcgggggaggatcggggcgatggtccgccagacagagaccccacgctttctccttctgcctttatcctggtgaggctgctgggctcctggcactgagggatggaggagctgggcatccacactccaggggcctgactccagggcctgaggcaggggcgctggactcttggctcccttgaagcacttgagtctagctgtcagtgtctgggatgtctgtctcccaaggggcagaggttgcaaagcatctgcctgggtcctctgacgcttggttcttccccccttccccagcgagccatccagcaggctgtgggaagctccctgcagggggacctgcccaatgataaaggtatggcggcttccggttccttttagcccctgccccctctctgcattctttatcctaatgtcattcatacaagcttttctgaagcctcctgggtgccacccttgtgctggcatggggagccaaaaatgggcagacaccctgtagctgccttggaagggcctagtgtgcagtggaagggagacaggcacagtgctgggagagggcaggaggcccacttgagctagcatggtgggagacgggtcagggcaccttccccgagcagggacagtgaacggctctctaaggacctagaagagtctaaggacctaggattagagggaagcctgatcagctgcagcaggcctacagcacgggtgcagcggcgaggggctgcgctgggcttccttggggctggcatgcaggagggtgtgagtggggttgggggaggcaggagaggtctgtggggactggatcccagcaaggcctgaatgccaggttgaggtgtctgagggcagacaggaggacgaatggctgagcgtcgcagcctctgaagtgggtgctgggaagtcctcctgggaggtggcgcatggaggcctggagagcatgcgggaggctggttccgctgtcaggaactagatcaagctcctctttcctctaccccgcaagtctctgcagcaagtcccctgtgtccaatcccccatgcaaatctctcaccagatggctctcggtgtcatggccttcgatggcggcgctgccggagtccacggtcagagccccgttcccaggaatcagggggcactgacacggctactgtgagtaagaagagggggctgggggcctggctcacgggtatcagggaggaagggatgggggcctgagtctgggggaatggggtttggggacctggactcctggctctgcgatgctgaccaggggcaatgttggagagtctgggggcctgatctgtgggcctgagctttgagtgttgatggcagtcaggctataggaattagatcctcagttttcttggggatcttagatgtctgggttcctgagaggttagggagtggggaagcaggatttgccagtcttcatgtgaccagggacggcgtagagcctctctggcctcttccaggtgttggacatggccacggacagcttcctcgcagggctggtgagtgtcctggatcccccggatacctgggttcccagccgcctggacctgcggcctggcgagtgagtagctgggcagctggagtgggagaggcctcagcgtgagagccagaagcacccctgaggctcacccaccccttccgccttgcagaagtgaggacatgctggagctggtggctgaggtccgaatcggggacagagatcccatccctctgcctgtgcccagcctgctgccccgtctcagggcctggaggacgggcaaaacgggtatgtggggccagggcggagctgggcaggtggtcgtggagttgtgtggggatcggctgtttttggtagtgatggtagcggtgatcatgttatttagacaaaacctttcccttctcttcgtattagacgtgattaaggctgtaggcgcatacagatgtacataaagtaaaaactgatgtgctggggctatgtgggagtggtcagcgtgtgtgacaactggtttcggcacgctaagtattagtgtcactgcactgggcgttcatctccccaggagggggactcttcgaatctctatcttcagagaagcagacagcctgaaaaagggcaggcacttgcccaagggcgcacagccagatgctccgtggggtgcctgggccttgagccctggtgtgtctgagtctgaagcccaagtttttgatgtctgagatgtgcgctgcccaaggaggaatctcttcctccaaccccacacacaacggtaaccctgtgagccctttagaccaaacgcgaacgcacatctcagttgcaaggaggacttgttactatgcacatcactgggcccactcccaagagttctgattctgcaggtctggggtgggacctgggaattttcattttaaacaatacatgctgctgagccctggactctgttgagaaccctgggtttaggccttccttctacgtgaacatctgtatttggaggaggggttggagggagaggagaagaaggtgcagtcagctatgggcaccagctgtgagccgtgagcaccagttctgtggtagagcaggcacaccactctgtgccaggtcatgtttaccttgtttaccttgtttcgctgtgtcgcccaggctggagtgcagtggcataatctcagctcactgcaacctccacttcccgagtacaagcgattctcctgcctcagcctcctgagtagctgggactacaaggtgcatgccaccacacccagctaattttcgtagttttagtagagatggggtttcaccatgctggccaggatggccttgatctcttgacctcaagtgatccgcccgcctcagcctcccacagtgctgggattacaggcgtgagccactgtgccctgctaccttgtttgttttttttgagacagggtctcactgcgtcccccaggctagagtgcagtggcacagtcacagctcactgcagcctcaaattccccggttcaagttatcctgttgtctcagtctctggagtagctgggactacaggtgcatgccaccatgcctggctagtttttttttttcttttttctttttttgagatggagtcttactgtgtcacctaggccggagtgcagtagtggggtctagtctctctgcaacctccgtctcccgggttcaagtgattctctcctgcctcagcctcctgagtagcagggattataggtgcgcatgccaccacattgagctaatttttgtatttttagtagaggtagggtttcactgtgttggccaggctggtctcaaactcctgacctgaagtgatccgcctgcctcaacctcccaaactgctgggattatgggcgtgagccaccacgcccagcctttattttttatttttttaaaatttttaatagagatgaggtcttgatatgttgcgcaggctggtcttaaactccagagctcaagcaatcctcctgccttggcctctcaaactgctgagatcacaggcatgagccaccatgcctgccacacccccccccctttttttttaacagctggaaatgatttatccattaagtacagtgatatggtgcctaggacttatgacattcttaggggc[139 bp omitted]ggtgaaaccctgtctccattaaaaatacaaaaattagctgggcatggtggcacacgcctctagtcccagctactcgggaggctgaggcaggagaattgcttgaaccaggagatggaggttgcagtgagctgagatcgtgccactgcactccagcctgggtaacagagtgagactccctctcaaaaaaaaaaaaaaaaaaaatcagaagctgcagaggataagtaaacaaatgggtcaggcaacgttcctctaaaacttgatttaggaaaacaggtggtatgctggatttgacccctgggccttaagagtgataagggtgtatccggaagctaatagtagttgttttcagggggactctgaggttatgttttctttgcttattccaggtagctttaaaaagaaaagaaagttcacccataatcctgtcccatacagaaatttatataaagctgtggatctcgcgtgtttgcagagcgctctagtctgtggagagtattttgtgcttaaggtgctgggaatagcaatgaggctaggaaaagctgaggctcagactgtcctcacccagcagcaggtgcagcctggctctttctgcgcactcatctattcctccgcttatcctgggaagtaaatgctgtcatcatcacccctgtttcatcttcccctaagcccttggcagctgagggaccgtacactccactcattgatattttttttgtttgtttttgagatgaagttttggtcttgttgcccaggttggagtgcagtggtacgatctcggctcactgcaacctctgcctcctggtttcgagtgattcttctgcctcagcctcccgagtagttgggattacaggcatgtgccaccacacccggctaatttggtatttttagtagagatgggctttctccatgttggtcaggctggtctcgaactcccaacctcaggtgatccatccacctcggcctcccaaagttctgggattacaggcatgagccaccccacccggccataaagggtgttggatgaatgaacatacccccattttatagatgaggaaactgaagtaagacacattgatccacttgcctgtggtcatgtggctggtgagggccagcccctggatcaaggggtggctctggtgctgccctcttgacccctctccttccctggcactgtcctcacaccactctgctggcatccttgcctgtggtgtggcctctgtcagccatctccatcgtgtgactgtggcatcatgactgtagtacttagcacagtgcagcgggctctttgggggcgaatgaggtgacatacgaagcaccatgcctggtttggaggaagaggcaaacctttgtcattgccactgtcactggtcagtggtgtctttgagtcctgagcagatgtaattccttgggtggggactcagcacagagtgaagagcttggggtgaagaccagccttcctgggctccccagctctgccatttcctggctctgcactggaatctcaccctctaccaaacgggagaaactcccacgagaggcagctggcgcagcaggccagagcttgtttttgtcttggagggggacttaggtttgaatcccagctctccccctgcagcctgttttcctgtttcttctccccccaggatggagtgtggtgttgtggtcatagctcactgcagcctccacctcctcctgggatgggtcgccggcactggtcaagatagttcctagtttcaaggccagggtacattgcccagggtcaggccagtgctgtctcaggatatgggagtgcaggttcggggccgcactgactgagtttacaccctgactgctgccttctctctgtgtgcccttggggaggatactgcagccctctgcctcagtttcctcctgtgacctttgggttaagaaccatggtgtgcagttgttgggagcatcctacggctggctcctgtgaagcacttggggcttcctgggcaggacctggtggcccagggagtgtccacggctgggccagcaagcaggcaccaggagggaggcaaaggccctgaccgcctctctctccctgttcctttgcagtttctccacagtcgaactcctctaggcccacctgtgcccgtcacctcaccttgggcacgggagacgggggccctgccccaccccctgccccctcctctgcatcctcctccccttccccttctccctcatcttcctccccttcccctcccccacccccaccgccccctgcacccccagccccacctgccccccgattcgatatctatgaccccttccaccccaccgacgaggcctactctccaccgcctgctccggagcaaaagtacgacccttttgagcccaccggctccaaccccagctcatcagcggggaccccctcacctgaggaggaagaggaggaggaagaggaagaagaagaggaagaggaagacgaggaggaggaggaaggcctgtcccagagcatcagccgcatctcggagaccctggcgggcatctacgatgacaacagcctgagccaggacttcccaggtgacgagagcccccgcccggacgcgcagcccacacagccgactcccgcccctggaacgccgccccaggtggactccacccgggctgatggagccatgcgccggcgggtcttcgtggtggggaccgaggcagaggcttgtcgggaaggcaaggtctcggtggaggtggtgaccgctggtggagccgccctcccgccgcccctgctgccgcccggcgactcggagatcgaggaaggggagatcgtccagccggaggaggagcccaggctggcgctgtccctcttccgccccggcggccgggccgcccggcctacaccggccgcctcggccacccccacggcccagccccttcctcagcctcccgctccgcgggcccccgagggggacgacttcttgtccctgcatgcggagtcggacggcgagggcgccctgcaggtggacctaggggagccggctcccgcgccgcccgccgccgactcgcgctggggcggcctggacctgcgccgcaagatcctgacccaacggcgggagcgctaccgccagcgctcgccctccccggcgcccgcgcccgccccggccgccgctgctggtccgcccacgcgcaagaagtccaggcgggaacgcaagcgcagcggcgaggccaaggaggccgcctcgtcctcgtcgggcacccagccagcgccgcccgccccggcctcgccctgggactccaagaagcaccgctcgcgggaccgcaagcccggctcccacgcctcgtcgtccgcccgccgccgctcccgctcccgctcccgctcccgctccacccgccgccgctcgcgcagcaccgaccgccgccgcgggggcagccgcaggtcgcggtcccgggagaagcggcgacggcggcggcgctccgcctccccgcccccggccacttcctcatcgtcgtcctcgaggcgcgagcggcaccgcgggaaacaccgggacggtggcggcagcaagaagaagaagaagcggtcgcggtcccggggtgagaagcggtctggggatggcagcgagaaggccccggcgcccgccccgccgccctctggctccacctcgtgtggtgaccgcgacagccgccgccggggggccgtgccaccctccatccaggacctcacggaccacgacctcttcgccatcaagcggaccatcacggtgggccggcttgacaagtccgacccccgaggaccctctcctgctccggcctcctcacctaagcgggaggtcctgtacgactccgagggactgagcggcgaggagcggggcggcaagagcagccagaaggatcggcgccgctcgggggccgcctcctcctcctcctcttcccgggagaaggggtctcgtcggaaggcgctggacgggggtgaccgggatcgggacagggacagagatagggacagggacaggtcatccaagaaggcccggccccccaaggagtcggcgccttcctcagggcccccgccaaagccaccagtcagcagcggctcaggctcttcatcctcgtcgtcctcctgttcttcccggaaggtgaagctgcagtccaaggtggcggtgctgatccgcgagggtgtcagcagcaccaccccggccaaggatgccgcgtcagccggcctgggctccattggcgtcaaattcagccgtgaccgcgagagtcgctcccccttcctcaaacctgacgagcgggcccccactgagatggccaaagcagctccgggcagcaccaagcccaaaaagaccaaggtcaaggccaaggcaggggccaagaaaaccaaggggaccaagggaaagaccaagccatccaagaccaggaaaaaggtccgcagtggaggtggcagcgggggcagtggtggccaggtgtcgctgaagaagtccaaggcggatagctgcagccaggcggcaggcaccaagggggcggaggagacttcctggtccggggaggagcgggcagccaaggttcctagcaccccgccccccaaggcagccccaccaccccctgccctcactccggactcgcagaccgtggacagcagctgcaagacacctgaggtctccttcctgcccgaggaggccactgaggaggctggggtccgaggtggggcggaggaggaggaggaggaagaagaagaggaggaggaagaggaagaggaggaggagcagcagcctgctaccaccacggccaccagcactgctgcagccgccccaagcactgcccccagcgcggggtccacagccggtgactcgggggcggaggacgggccagcttcccgtgtctcccagctgcccacgttgcccccgcccatgccctggaatctgccagctggtgtggactgcaccaccagcggcgtcctggcctgtgagtgtcccctgggggagggtggtgctggggcaggtgagacaggatggggactggagggtacagacttagaggcagtggggtgccctggcagggagaggtttatagggacatagactgggagggtgggggtgagtaaaggccagccaggctctaggtgcctgggtgtactgggagagaggggccggtgagagcaggtggtggccagcacagactggagtggtgggctgggttctgggattcccctagacggggagtaggagagagggaccagaaagaatggcttgagcagggcatcgtattccttacggatggcggttgcctctaccagactgcagaggtggggagagaggttgggactggccacagcgggtcaggaggcagaatctcactcctgccactgtctcatcactgcatgaccctggccaaccccgcacccacacacctggagtcccaagaacattcgtggtatgggctgttctctcattggccaaggcccccttttcccagttctgagcgtgaggctttgtggctgttctggggccaagggcaggagatgacagcaggtgtccaggtgaggttcaccagctcctgtcctgtcacctctcccatcttcatgttgtcacctctctgcctcctgcagtgactgcacttctcttcaagatggaagaagccaacctggcgagccgagcgaaggcccaggagctgatccaggccaccaaccaggtgggctcccctgggggagagtccctgccgccccttcttttgtccattgcctcgggttaggagaggaaccgcgggcctggcagctctggggcaaggtatcggcctgaagaggagcctgttgcctcagctgtggggaagtcagcgtgggaacagtggggtgcacgtcccctcttcccctccacctccctttactcatcacccctctgtcctcgtcccacagatcctcagccacagaaagccaccctcaagtctggggatgaccccagctcctgtgcccacctctttgggtctgccccctggcccctccagctacctgcttcctggcagcctccctctggggggctgcggttcgaccccccccacccccaccgggctggctgccacgtctgacaagagagagggcagcagcagctctgagggccgtggggacacagataaggtgagctggcctggggagaggtggggcggtgctgacagttctgtagagaatatggacaggaactgagacgcgggggcccaaggagaaagggagactgaggcagggagacagggccgtagagaccaaagtcatggaaccataaggaactccactttgctggaatgggtgagcaggaaatgcgttaggcgtgtccaaaggaaaatcgcgtctgtgcgtgtgtggggctgtgtgcgtacacaccacatatacacaccctggaagagatgccccgcgctgcagcccaccccttgattatctgttgctcgcgctgtctccgtctctgtgagtgggggagggtggtttccgaatgaaaactcaagaacctgtttgtagatgaagcaggggagaatgggtgccaggcagacagtaatgtaggttcttactcagctgctctggccggctcctactcctgggctctggagctgtttctctcttggtcaggtctagatgtgggtttttgtttttgtttttctttgagatggagtcttgctctgtcacctggtctggagtgcaatggtgccatctcggctcactgcagcctccgcctccagggttcaagtgattctcctacctcagcctcccgagtagctgggatgacaggcacccgccaccacacccagctaatttttgtatttttagtagagacggcatttcaccacgttggccaggctggtcttgactcctgacctcaggtgatctgccagcctcggcctcccaaagtgcagggattacaggtgtgagccaccgtgcccggccttggttggttggtttttgagacagggtctcgctttgtcacccaagctggcatgcagtggcacagtcacagctcactgtagcctcagccttgatctctcgggctcaagggatcctcctacgtcagcatcctgtgtagctaggactacaggcacgcgccaccatgcccagctcatttcttaattttttgtagagttggggtctcactatgttgcccaggctggtctcaaattcctgagctcaagtgattctcccacctcagcctcccaaagtgctgggattataggcatgagccactgcacccagcctagatgtgttttcttacagtctagtagcccatagccagacggtgacgttggccacccttacacagctgtgtaccgtgccagataaagctgtataaaccccattaaacatcctgtgtgagccgcagaggcggggctgcagtttagtcggtcacttgtccgtagcttgtgccttgcgctgcaggactcggacggtgaggaccccctggtctacagtggcccttgctctgccctggtctgtgctctgccctttgccccgctttgcccatccgagatgggtgttggggagcagcgtctctctagagacccacatcctgtggggccaggcaagcctgagaagtccctccagggcagcctgtgtctcttctggccacagagttccctaacagctcagtagctcgtcagacagtgtcactgatgttgctcctggagtcggctagccattgtgccctgcccttcccaggactcagtttacctgcccctactttgatagtcacctggcttgggagggcagcttctccaagggtggtgccaagggactgtcccttgtgcctgcagaaggcctgttcttctctggtcccacgtggctctctggctagaggtttcctgtctgcttttgcaaggattctgcctgaggccagggctgcagctgctgccccgagcctgcggctgcgggatctcctagcttgctggccacaggcgggaagagccttgcctcggaggctctctgccctgtccctgttgcgtcctccccttttcatcccatggccatcccccttggaacaggcacagctcccctggattgagtctttgctctgtacccagcctgtgccatgtcctccatgtgtgtcgctgtagtactgcccataggtgctgtccccgttttacaaatgagccacaaaggtggccaggcacggtggctcatgcctgtaattccaacacttcgcaaggccgaggcgggtgaatcgcttgagcccaggagttcaagatcagcttgggcaacatagtgagacctagtcgccacaaaaagtacaagaattagccaggcgtgggggtggcacatctagtcccagctattcaggaggctgaggtgggaagatcgctttagcccaggagaccaggggtacagtgagcagtgattgtgccactgcactccagcctgcatgacaatgagagaccctgtctcaaaaacaaagaaacaaaaaaggagccacaaaaaggtttggctgagcatcccaggggtcagagacagggagtggcagaccaggcttctgatacaaatgggctcaaggtcagtccccacccccactccccagtgcccctcacccctagccaccccctccatcccctgggtgaccagagcagtactgtaaaaacctaaactgagtcctccccgctcccgcggtgaaaagccctgtgcagttttctacagccccgcctctagagtctgattcaaaaccagctgcaatttcttggccaatgcctgtcttctcatcagactgaactttgtgagggcaggcgacacacatgtcctggtcccggccaggcctggagcagcccagggttcggcctggaggagatgttcagtgacatgcagaggcccaggcctggcctttggtcccgggcacctgcagcagagggcgcatgggacagaccctcagcaggacttccagcctgagagcagctggacggccagagaggttaggctggcagcagaggcgagtggaggtggaggttccgcaggtactcactggcccttgctgtgtcttcccccgctgtcgccaccccaccagtatctgaagaagctgcacacgcaggagcgggcggtggaggaggtgaagctggccatcaagccatactatcagaagaaggacatcaccaaggaggagtacaaggacatcctgaggaaggccgtccacaaggtgggcacccggagagaggggcagacacaggccggggagagaacgagctggagggacagatgtgtgcagacagatggacgcggatgggagacggggaggaggtcagtctgggaggtgaggagggtgacaggattttctcaaggccacctgggcctgttccgctggccctggggcacccatcgtctagggggacagagggactttggcctggttattggggaagctcctcctaccgcagttccaagctgcgcccaacagtcctgggtggatggggccccgggagcctggtggtgactccaactgtccccggccccccagatctgccacagcaaaagtggggaaatcaacccagtgaaggtgagcaacctggtgcgggcctacgtccagcgctaccgctacttccgcaagcacggtcgcaagccaggggaccccccagggcccccacggccgcccaaggagccagggcccccagacaagggtggcccgggcctgcccctgccccctctctgagagccctggccagctcttcgcccctcacctctttgaaactctggacgtatttatggctccacctccccacctccctcccccgtcagtgggatgactgggggagggttgctgcagggaagaggagagccccctgccctgccctgccccgtgtccacctcccttgcccccaagcctgtccccagtgcccctcccttctgtttgtgcccctctccccaatttcattaaagatttcatgaaacattacccctgagccccatggttctaaccctttgttttcggagacaaatttgccagagggttggggagggacccccaggaggctgaggatgggagacagagaccagactgtgacttggggcagctgcctcccctgggcctcagttttcttatctgtgtagtgggtgttgtgatgattgaacaagacacaggtggagcacttagcacagtctctggctgggagcgagctgctcacagggaggcaggggccggaccccacctgatcagcatcttcccagctcggctcctgggtgccatgtgcctgccttggaattgctcccagagcaggatctgtgttccccattgagttggcttctcttttcagcagccccgtgaagctggggtgatctcatcaactgtcctgagagggaaactgaggcacagagcagcaagggccgaagggtgagtcagggctgcgctggcttctgccagtttcatcacccagaactgcggcccaaccaggagaggtgacagtgcccagggtcaccaggcaggcaggctttgcaggctccagggtggccgcagagcccctttaccaagacccctccagccccacgtggaggggagcctgaggcctggaaggagaaggaccacttgcccaaactgttcataggcaaggcagggggcctgggttctggctagtctttgtgtttcctactctgtgacctttgcgcctctcccagcctgtgtcttggtctacaacacggggacagccatcacccaccaggtccctgggcagaagtgaggaggtgtcagctgccccctgcagtgcttggtcttcatgcattgagcacctgagttgtatatagctgcacagatgggtaaactgagaccctgagcgggaataacaaccatattgggtcagagggcacccaacaccagacacgcacaagtgatcatagcaggaaccagtttattggttgaggtggtggggaacaggggggttggaggcacaccatgaggagcgagggctcagctctccccagggccctggaaatccatgccctccaccaagtcctgcaggtaggccttgtactggtcggaggtgagggagagtgggtggctgttggaaatgtgcaggtccacagtattctccagggaggaggcaccccctacccgggccatttctaccaaggccctgaggcacgtgggcacaacctgcaggggaagtggggacaggagtcagggaaaacacccagccactgtccaccaaggtaggagtcagggcttggaggactacaactccctgcagcccctgctgtaacctaggatgaaccataggcctagggctgctgggagttgtagttttacacacacacacacacacacacacacacacacacacacacacaccccctgctgtaactgaaccataggcctagggctgctgggagttgtagttttacacacacacacaaacacacacacacacacacgtcagggctgagcagtctgtgatcttgactcctgggagccacagccatggcctcacaatggcagctaaaacttgagtccaccagcttctacatggtttagagcaggggtccccaacccccctacggcttgttagggaccaggttgcacagcaggatgtgagcagcgggtgggggaatattactgcctgagctctgccttctgtgagatcagcggcagcattagattctcagaggagcacaaactctatcgaactgcgcacgtgagggatcggctgctccttaagagaatctaatgcctgatgatctgcagtggagcagtttcatcccgaaaccacacctccctgtccgtggaaatattatcttccatgagactggtccctggtgccaaatagtttgggggccactggtttagagagttcaaaacaggttctgcaggtgaggccatgggaaggagctcccggggatgaaaaactggttattgcagagatcttggaagttgcagttttttagagggccctctgggagttggagttcctgggagcaacctcttccctctgtaaggccacccctttcagccccagggactcaggtctgcaggcaccttgaccatcacgagcctcttggtccacggctggtcctggggccatgactcccccacacagaaccagagggcatagcgtggtgagcgtccgcttccttccgtgaaggtaatcagatctgggggcccaggagcctagtcagggatgagaagaggaccctctacccacccttccccgtaaacttgaatgataacccccaccacctcccctgacctaaggccctctgctgcctcgaccaggggactgcttgtttggggaaagtcccctccttccctccctccctccctcccatcagggtggggttgttggaaggccacacccccaagcccccaagcctcagcattcataacaggcccagagtagggggcccatgctcccaaggatgctcagtgaatctggagaagctggttggcattcagtcctgtctgaggctgcattgtccaattgcagccattagtcatgtaaggttatttcagtttaaattgtaaccaattaaaacgaatcacgtcctggttgcactcgcctcacctgagtgcttggcccctgtggctagtggctgctgcaccggacagtgcaggtgactgtcatttccatcatggcagaaagtgccactgcacagcgaaaccctaagggatgtagctttcctgctattggtctgttcaccatcattagttacgatgatgatgacagtggcagctaattccctgagcaggctctgtgtactgggcctgtgtctcaccccagcgctggcaggcaggtagagagaggagaccatccttggattccacgggctcagggcaaagtcctttgcctcggttatacagcgggccaagggcagccagcgtctgaattcagtcctaatcatgagttcttttttttttgttgttcgagatggagtcttactctgtcaccaggctagagtgcagtggtgcgatctcagctcactgcaatctccgcctcctgggttcaagcaattctcctgcctcagcctcccgagtagctgggattacaggcacgtgccaccacgcccgactatttttttgtatctttagtagagatggggtttcactatgttgaccaggctggtctcgaactcctgaacttgtcatctgcccacctcagcctcccaaagtgctgggactacaggcgtgagccaccgtgcccggccaatcctgagttgttaaccactgtgcaggctgctttgtactggccaggtcgaagcccctgtctcactcacctacaatgaagggccccaggtcaaacacgcctccttccttgtccttggggacctcgccatcaggcccatgcccgctgttggggagcagctcctcgctcactgcccagtatgtgtggcagtgccccagccgctgggcccagagccactgcccggcccgccagagagccagtcccccacccaggcagctcagcacatgcctcacgtagctcatcactcccctgtctgtcagggacatgccagggtctggcagtgtgactggccatccaggcagcgtcctgtctcccacttcggaccccaccagccgcaggccctccgggcaggagatggtctgctggaagacttggcggccccggtagaaggctgtcacctcgaactcccactctgagcagcggcagcagcggcatgaaggggagaggggttgagaatcaggggctgccgcccagacctcagccctcccagcctgcagctgacactcaccttcccccggcaccaacagccgcttcagtgggttctcagagggccccaggtttgggaagggagtgggattgtccaagctggggctccgcaggggctgagggcagggctcaggggctacagccaggcttgggggtcccggatctgggagtggggccaacaccatgttacccagtaactcatccagaatgtcttcctggagggaaacaaaaaaagagaatcaggcatttccatatccttttctggagacttcatatggaccaggtctgttctcagcaacgcagggaggtcaggcttgagctctgccttcaaggggcttccagcctggggacagagccagccatggcatcaacagccaaacaaacactaatgaacgccaggtgctaccattccaacccaaggatctggctctatgcaggtaagacctgggcaaagcaggctgggtagaatttcagaggggatgctcccccagcttgggcctcagcaggatcaaggtgagggagtttttcagttcccaagaggctgacagccccctgcgaatcgaaatccatgaaatcccgggaaggtgtgctcgggccttgaatgctgggtgaagacttggaattttctcctgaggagaccggggcagggacagacagggtcagcactggctcaggtgaggggcaggctggaggcaggggagtggggggatcgtctagagggagaggacaaggcccatggagacaggtcggagactgaggggcatgaaagttgggcacattctcacctgggtatcagaagtactgcctccaccattggtgtccggagaggtgtctggctgggaaaagtccccaactcctgttgagaaaagtggtgaggggagtaggagtgccaggaacccttggggccccagcctcccacacgaaccccaagctggcagacctgagttcacaaactcgtagattttatgtgggtcgtgagggtccttgctccggtcctctgctaaacgcaacccttctttgcggttgagggcagagcggaaattcctcttccaggttggcaggtctggcttatccctcccgggaacatatgcaccagtggcctcggcccaggcctggggcaacagtggtgtcaggatggtgggggaggacgacttagatcctgctcctggggccctaaccctgtctcccgagtcctaacaccaccctctttccctggcaagttctaactctgcaaggtccatccccaaatccccccgtcccacctacctccatcccccacctctagttttcaaaaggctttttttctttttgagatggagtttcactcctgtcacccaggctggaatgcaatggtgcaatctcagctcactgcaacttccgcctccccggttcaagcgattctcctgtctcagcctcctgagtagctgggattacaggtgggcaccactacacctggctaatttttgtatttttagtagagatggggtttca[132 bp omitted]tttgttttgtttcgcttttgtttttaaagagatggagcctatgttgcccaagctggcctcaaactcctgggctcaagcgatcctcccgccttggccttgcaaagtgctaggattacaggtgtgaaccaccgcccccggcccaaaaaccttttctttctaagccaggcttccaagtccaacttggtgtctaatcccgtgcaccacctgccccgcgacaccctctgtgataaccccgcccctcacactgtttaccacctctggcatatactaattcggtagttaggaacctcagatttggggctccaggcctcacctctgatgtttcaagaaccatcccccagtatctatcctacaaccaagagccccggcctctagaaagccccaaacccccaggatgcatttcctttgcgtactaaccggctttcccggttttattcccgtaaccctgcagctccaaccctgcttgcgccccaccatcagtcagcggatccggctagccccgcccctcccgttctagccccacccaccagcgttggcacgagcccgcccctcgcgcgccacctccgccttctcagccgggcccactaggagtcctttccgcccagcgcgcagctccgggtttccagcgtcccaggtcgtcgcacgcacctggaagattccgaaatcctcctgctgtgcatcctgccgtaggccgtgcttccaagggatgcggaagcgcgtgcggctcttgttcacccaggccacgccctccagttgccccaggtccagctgcgacaccagccagggcaggatccgtggctttggggttcccatggtccggcctgcgcgtatagggcatttcctgggcgcgaccggcctcccccggacccacctggcctggagtttccgcacccagacctccttctcacgggccacggcacaggtccttcacccatattttcgggggtacaaacaggaaacctcctcttcccatcctcccatcctcccgagaggctctctaatcagctagggttccttcccatatccatggcacatccttccccagcgtcttcagtgcagaccctccactccctcaattccgccagtatagacctcctccctcccccacatcatcgaaagtaagtatccccactttcagggtagcatcctctttccctagttatttcagtgcagaatcgattcacgtgtaagcctctacctcctgcacttaccccaatgtagacccccttccacagtccccctacagaagatctcccaaaacatttccaacacagaacttccattcaattcccctccgactgcccgcctccctcctccaggacagagcacgccccaggtttcgagactgaactacccccatctacggagtccacccctccctctctagaaccccctcagtgtagacgcctcctcttttcctctttcctccctactttttctagtttttctgcagccgacctccagcgtcggccactgtagctccttccttgctccactttccccagagtacacagcctgcctttccactctccgtgcagacccatcctctttcccgctcctcgctctcggacgccaccaacgctctcccgggctcttccgcgttacctacgatggaaggtcggggcgtgcgggcagctggaacccacccctgtcttggagctccgggtagctctcaaactcgaggctgcgcaccccctttcccgtcagctgagctctagagcgctggggctttctttttgatcgacttcttgaaataaaaccaactttatcattctttgggtaacagacccaaaagccgatgggacggcccgctgggctgttcccgcccctatgcccttttttgggtttccggccagaggcatgctgggagcgtcacatgcaaattgagcgtgcacccagcgttccgccctttctacgctgggccggttatcgacccggcccagtgcgcaggcgcgggaaagttgaactaataaagtttgtacgagttcagtggaggagaccgcaagttgagtggaggaggcggcggtggggccccggaccaggtcagcggggtgttgacgaggggtggggtgaggagggaagaggagggggccgggatccagtggtgggcaccccagtcccgcttctctgatatccaagggtccagggtcctctagattccagcaggggtcggagatttggaactacacctcacagcaggctgcgcggcgaagaagcgcggacctaggggaagatttgccctgaaacctcttgggattggtagttcccgatgctttaagggtttcaggagtttggcatatgcctcttatagaatccaggagttggggcgctaagcctcttcttcctgggagacctaagggtctggggctccagttcctttttctctaagactcagaagtccaggaccccagctccctcctcctttagacccacgaatctgggcacccagccccaccacctttccttggatcgaagagtctttttcctgatcgctttttcgtctgaggactcaagagtctaggcccccagacccacactctccaaaggacccaggagtccaggccctcagcaccttccttgggactcacaagtcctggtccccaagcctccacttcttgctaaacccttggagtccagtccctaaccctctctctcacaggtgcctccatggcaggctctgaagagctggggctccgggaagacacgctgagggtcctagctgccttccttaggcgtggtgaggctgccgggtctcctgttccaactccacctaggtaagaggagtggcccttctcccccaggggccagcatttgaggctccctcctaactcttgctcctggtctcagtctgtctcctctctttatatctggctctattctctgtctttggggttttggagagaggtcctcagcgggggagggagggagttggggaaagagactgcttgcaggggatctctggtggggtcagtctctgaagtcctcctctccagaagccctgcccaagaagagccaacagacttcctgagccgccttcgaagatgtcttccctgctccctggggcgaggagcagccccctctgagtcccctcggccttgctctctgcccatccgcccctgctatggtttagagcctggtaagagatttccatgatcatctatgaagccggcagaacacgggataaggtgctagtttaagatcactcagctagggggtggctgtgtggagtctctagcaccagccttcaggacagaaccgtcctgtcctctcccctccccagttagatttctgtcaattctgtgggttggctttcagagagcatttggtcaatctggttgttgtctctttccttccataactacttccctgcccctaggacttttgtagccaggaatacccctgatagaggggcagaagggctggttttcaatcacatctccctggctgttttagttgcgtgactctggggaaaatgctttctcttccctgctcccctgtttttccaatagcagagtaggaattggggaggaggtcactggacttgatcaaggtgacccacaagtttcctcataggtgtgaacctggacagactagtaatggctgctgggagtgctagcttgaaaaggggttcacagcttgggagaggaagtgctgtgatcaattggtgatgtctgtagtgagtgagggaaggggatactaacagtaatgtcttgtgtttgccttccttggatgagatcatcttcaaggtctagttgagctctgacagtcttttggagacagattgttgctctgtcacccaggctggagtgcaggggtgcaatctcgactcactgcaatccccacctcctgggttcaagcgattctcgtgcctcagcctcccgagtgactgggattacaggtgcacgccagcatactagctgatttttatacttttagtagacacggggtttcgccacgttggccaggctggcctcaaactcctggcctcaagtgaccctcccacgtcggcctcccaaaatgttgagattgcagacgtgagccaccgcaccctgtcagctctgacattcttttttttttttttttttttgagacggagtttcgcccttgttgcccaggctggagtgcaatggcccgatctcggctcaccacaacctctacctcccgggttcaagtaattctcctgcctcagcctcccaagtagctgggattataggcatgcgccaccatgcccggctaattttttttgtatttttagtagagatggggtttctccatgttggtcaggctgctctcgaactcccaacctcaggtgatctgcctgcctcagcctcccaaagtgatgggattacaggcgtgagccactgcgcctggccccagctctgacattctaagtccagtctgaggatctcataaagtgaaaagtacaagggttttggcatttttaaccaagttttctcactgggcctcagtttaccccattataaaatgggaatcatggccaggcttggttgctcacgcctgtaatcctagcactttgggaggctgaggtgggtggattgcctgaggtcagcctgggcaacacggtgaaaccccatttctactaaaatacaaaaaattagccaggtatggcggcgtgcgcctgtagtcccagctactcatgaggctgaggcaggagaattgcgagactccgtttcccaaaatcaatacataaataaataataaataaaatgggaatcattgccacctgccaaggtagttgggggaaggagagaatccgtaagtttccaatgtcctggaaacctgtcattaactcttttcaccccaggcccagctactccagacttctatgctttggtggcccagcggctggaacagctggtccaagagcagctgaaatctccgcccagcccaggtgaggcacagaggagccccagagaaggatggcggtgggaggatagtcagggttctgcccccagccaaattctcttctgcctccagaattacagggtcccccatcgacagagaaggaagccatactgcggaggctggtggccctgctggaggaggaggcagaagtcattaaccagaaggtgatgggcatctgtcccactccttggcaaggacaggagttgcggaatggtggggcactgggatcagaagctggatctgtattttctttggatggtca[141 bp omitted]gtgaaaccccatctctactaaaaatacaaaaatcggacaggtgtggtggtgcgcttctgtaatcccagctactcagaaggctgaggcaggagaatcgcttgagcccaggaggtggaggttgcagtgagccaagattgcgccactgcactccagcctgggtgacagagtgagactctgtctttaaaaaaaaaaaaaaaaaagaatagttgaatgacaggggtatggttagggtagtactgtaccgtaaattagttgttttaattgattgtttagaggggcatggcctaaatgcagagggtgtggccatcagaaacattatccacaagagactggccaagctggggaagtaagtgaatgaatgtgggggtggggggagtggctaaaatcttactgagcatagaagggacctggcttagaatgtaggggaaaatgtactaccagaggaggtgtggcttgtggctgtgtcctggaatctgattggcttcggagcttggacaaggtacatcgtcctttaatattaattgaatggtagagggcaagattgttgtagacactaggttggcccctgggaaaggtcaccaggggcatggctagattaactcagttacagtagagattggccctgattggctgttgaggcaagggcctggcatggcttagggactcacgttccaggccactatcccgggggtagtttggcagagaccctggagtctggcttgattggctaatatggatgaggggtggcctagaaccttagcatctagaacgatcctgaaccgggaagccacgcctcccggccctctattggctggccccgggggcgctgctgacgcggaccctgcctcttccaccctacagctggcctcggaccccgccctgcgcagcaagctggtccgcctgtcctccgactctttcgcccgcctggtggagctgttctgtagccgggatgacagctctcgcccaagccgagcatgccccgggcccccgcctccttccccggagcccctggcccgcctggccctagccatggagctgagccggcgcgtggccgggctggggggcaccctggccggactcagcgtggagcacgtgcacagcttcacgccctggatccaggcccacgggggctgggtgagccgctgaagcctctctctccgggcctcactttacctaactgtcatgtgatagaggaggggcggggacttcttaggttcctctcagacctcaggtattctcccagctccactgcgttcgttctgttgagcccttgctgtatgccaggactgcagcgatgagtgcagacactatgcctggcgtcaacgactgggtacgctaatactgtgagcgtgaaaccagtgactgaggttactcagggagaggccggacggggtagctcatgcctgtaatcccagcacttttggaggccaaggcaggagaattatttgaggccaggagttcaagaccagcctggacaacatagtaagaccccat[132 bp omitted]aaaccctgtgtctactaaaaaaaatacataaattagccgggcgcggtggcaggtgcctgtaatcccagctaccgaggagactgaggcatgagaatcgcttgaacctgggaggcagagattgcagtgagctgagatcatgccactgcactccagcctgggcgacagagtgagactgtgtctcaacaaaataatataataaaaacctggtgcggtggctcacacctgtaatcccagcactttgggagactgaggtgggtggatcacttgaggtcaggagtttgagaccagcctgaccatggtgacattcagtctctactaaaaatacaaaattagcccggcatgcctgtaatcccagctagggaggctgaggcaagagaattgcttgaacctgggaggcagaggttgtagtgagccgagattgcaccactgcactccagcctgggcaacaagagcggggctctgtctcaaaaaataaataaataaaaatttttaaaattaataataattagcaaagcatggtagctcacacgtttactcccagctactcaggaggcagaggagccgggaggatcacttgagcccaggagttcaaggctgtggtgagctatgattgcgccactgtactccagtgtgggtgacagagtgggaccctgtctcaaaaaataaaatagtgagagtagtagtgctacctcaaagggtcgctctgagggttaaaatggggtcaatgtggtaagccctctgtgcactgcctggcatgcaggcattttgttggtgaggttatatggctacctgctgcctttccaacagtgcctgccaggatgccctcccggggaaccccctgcctccgtcctgctccttctggtgggctctggtttcacccccaacgaggccttcccaggtccccattgacaatcacagccacctgcacaccctcccaccgccctccttcccccttcctgctttacttttccttccatagcactttgggccttccaacagatggtggaattgacttgttttacttgtcttctggtttatttttctttgttggtgtctcccacctctaacacatcagcttcaggagacccagaagtcttcccctctccttttcttactttatctccagtgccggtttcagagttggattgggctccagcgtgctggccctgtggcttggcgactgtcgcagtctccctgagcggcactctccccactggtccagtgagcaccgtctcatttacctgccttggggggtcgctgtgggtattcactgagagagggacacaagccaggctctggatggaaccggtttccctggcaggagctggtcaagtgtgtttgaggagcagggaggaggaggccagtagggctacagtagggtgagcgggcgacagatgagaggaggagaggcgccgggccagccaggaccctgtggtcacggtgagtgacaactcggactttgactctgggtaagccaaggtctctgagcagcggagggacaggcgctgatttaggcgctaatgggcgccctctggcggctgcctggggacagactgctgggggcgagggcagaagtaggggcacagggaggaggtgagtggatctcacccaagtcgggggcggtggagaatgctggatttaacttagcggtgaagctgacagatttggctaatgggccagatgtggggacagactaaaggatgctggcccgagcagctgcagggcgacatcttaagttccccgagatggggaaggtgtggggatgggggcgatgggggtggggagcaggactggaggtggtccggtctacagtaagatcagaactcatagcacatgttgaggggaatggatataagtgttgggctcagcaaagaagctcgtttattttattttattttaatttttcagatggagtctcactctattgcccagactggagtgcagtggcacgaccttggctcactgcaacctccacctcctgggttcaagcgattccctgcctcagcctcctgagtagctggggttacaggcgcacaccaccatgtccggctaattttgtagttttagcagagacggggttttgccctgttggccaggctggtctcgaactcttggcctcaagtgatccacccacctcggcctcccaaagtgctggaattacaggctgagctaccacgcctggacaatttcttaaaaaatttttttaaagtaggattgatagcagatgagttttctcggtgggccaggtcctctgctagggatttcaatggaatgatcccatttaaacccactacaacctcatggggctcttattgtcctcgtcttgtgggggcagagaggaaaagtccccagcatgcagagtgttggaatctggatttgtacacaaagccacgactctgaattgttcaaatcccaagactctcttccccatctctgactctgtcccccaactcttcactctctctggatctctgtctaatcccactccagtgtcctgaccctcctcgagctcaacctttcctcctcctgctaggaccctgccccctcatccctgtgcccttctgtctgggtctctgtccccttgtctgggtgtctgtcaccctccgctctctggttcctcgccttcccgtctctaatctcacagggctgatgtggacgctgctgtatggggggaacacctgccctgctcacagggctctgccacttttcccttccaggagggcatcctggctgtttcacccgtggacttgaacttgccattggactgagctctttctcagaagctgctacaagatgacacctcatgtccctgccctcttcgtgtgcttttccaagtcttcctattccactcagggctgtggggtggtggttgccctacctgtttttgccaaaaataaattgtttaaaacttttcttattaaaaacgttacaaagtattcaattgtctgttcttacacttgggaactaaagttttaaggagaggagatttggttcagagatttctgtggcttacgcaaattgaggaaagaaccagttcattcattctagaaatatttatttgcagcacctacaagagcctgtctcctggacatgtaacatatttgagagaatacctgtaaatattccagcaacttgcatttttttttcctattgcacgatctggttattctagctaatgctgtatgatggtcatggagtctttccagtgaattccacagaaaggtacagtctaacttcacctgtgtctaggacaccaccctcttcttgtttttctcctcccattgctcctttcaagtctctcttgctggtttctcatctacctacagaccagtggtttgtctcacacacaccccccactctccctttttttttggagatagggtcttgctctgttgcctatacttgcactgttatatagatacagtggcactatcatggctcactgcagcctcaacctcctgggctcaagtgatcctcccacttcagcctctctagtagctggaactaaaggcatgcgacacgacgcctagctaatttttaaaaaagaatttttatgggaggccaaggcaggtggatcacttgaggtcaggagttcaagaccagccaggccaacatggtgaaaccccatctctactaaaaatacaaaaattagccgggcatggtggtgggtgcctgtaatcccagctacttgggtggctgaggcacgagactcgcttgaacccgggaggcaagaggttgcagtgagttgagatcacgccactgcactccagcctgggcaacagagcgagactccgtctcaaaaaaaaaaaaattgtagaaatggggtctcccttatgttgcccaggctggtctccacctcctgggctcaagtgatcctcctaccttggcatcccaaagtcctgggatcacaggcatgagtcactgtgcctgggcggtttgtctcctttatagggccatatcccccttcacagagtaatgtttgtaaattaataagtgaaatgtacaggattacaaaccgaaccaattacagttgatcctcagtatttgtagattatttgcaaatttgcatccttgctacaatgtattcataccccaaaaattaaggcagtgcttttgtggtgttttggagggcaatgcttatgcacagagctgcaacaagctaaagacctgatgtgcatatttgcagctgggctcctcttgcttcagctcaaacactggaaacaaatgtccttttcttggtttgtttagtgccatgcttttcaatttttttttttttttttaaagttagagtctcggtctgtcgctcgagctggagtgcaatggcttcatcctggctcactgcaacctccacctcctgagctcaagcgattctcctgcctcagcctcccaagtagctgggattacaggcgtgtgccaccagtcctggctaatttttttatttttatttttatttattttattattttttgagatggagtctcgctgtgtcgcctaggctggagtgcagtggcaccatctcagctcactgcaacctctgcctcccgggttcacgtgattctcctgcctcagcctctggagcagctgggactacaggcgcccaccaccacacccggctaatttttgtttttttagtagagacgggggtttcaccatattggctaggctggtctcgaactcctgagcttgtgatccgcccacctcagccttccaaaatgctgggattacaggcgtgagtcaccgcgcccggccaaattttttttttttttttttttgagacaagagtctcgctctgtcacccaggctggagtgcagtggcgcgatctcagctcactgcaagctccgcctcccgggttcacgccatcctcctgcctaagcctccacgcccggctaattttttgtatttttagtagagacgggggtttcaccatgttagccaggatggtctcgacctcctgaccttgtgatccgcccgcctcggtctcccaaaatgctgggattacaggcgtgagccaccgcgcccggccgcctggcgtaatttttgtatttttaatagaaatgggggtttcaccatgttgcccagactggtctcgaactcctgatgtcaagtgatccgcctgcctccgcctcctaaagtgctggaattacacccgtgagccatcgcgcccgaaccctattgtaaattttaagtctcaggcgtttgccagcggcacgccagagagtatagcctgcgcggaggcccagaaaccaaagagcgagctcattccgggattggagagaagtgtgagcagagggaagtagagggatcggggagaggaggggcaggacccacgcattcggccctttgcattcagcttcattcaactaggaactttttctgcaaatcaaggaaagcttcccggaggaagtggtgcctaagctgtgctctgattcacgtttagaagctgaccagacaaagagaggtgggcgttcctggcagggggagggacttggcaaaaaccaagtggcttgagaggggttgatggttttaaaaaacttggaatgattatgtcaagggctagggatttaatgtgttgacgacggactcctattcctcacttgcttcgggaccccagctatgcccttcctctctctgggcctctcaccgattccgtttttcccccaggtaatgagcacaagctccctttttcctccagactccccccgggttgggaggatccaccgagtggacgaggagtgataattcctttgagccaatcgttggtgcctgaagccccgccttcttccctacccgtgggccaattgccgtgttctccttgaggccggccgcttggcgagggtgggccaaaggctgcgtgacgtcgcttccggataaaccaatggcagcgattaggaggcgggtcgttttggtgatggacaggtgtttcaagacgcccctttagcgcggggctccccgggaagctttgaggcggtgctgggtgtaaaggggagggcattcctggtggattttgcccaatcaccagtcgcgcttcttgcaatagacgggcagttttccccatcccgggtcgacttgagggggcgggattctggacgccagagttggcaaacccctgacctatgatggacgtattctctagccaattactagacggtattctcagacgggccgcctccattgccaatgaaatcttccagcggggtcgcggtaggcgggccgtggaccctctggtataaggcggtcccgggggagtgaggagaaagggggggtcttggcggccggaggaggagtaggtgcgggtgaagatggcggcagccgaggccgcgaactgcatcatggaggtgagcgcttggagcgccgccgtgggcgggaggcggctttgggtcggtgtttcacgcctctgtggtggggaaagggctctaagttggcgatatggggttggaggtcccccgccgcacacgggggcgccgcacgttccacatccggggatatcgtttgaggtgacggctccctagcttccaagggccttcggcatccggcctagcggagggtcttatcccccctcccacgtggaggagggctgggggcgcttccggccaggcccccacgtggccgctgcgcggtgggtggggagggggtgtgccgagtccagtggcccggcgggctccacgtgcgggacaaaggccccgcccccggccggggaggggcgcccaggggggcggggagggggtccgaccctcctgacgcccccagccctcctccccggggacctgggcacacgccgtggggtgtgatcgacctggggccctccacgatgtggggagtctcttgggaggagcagtgcttctcagccctttaccaacctccttccgagctccgggggcatctgttgggatatcggacccggttttgtgcgttctgggttagggactggaggaaaaccaagaatggggtcccccgccgaccccgtttcccctcccagaattctccccctcgcccagggctttaggagttgggggatggggcatgcccctgtgacctccctctgggtggtggtggggcatctagatagagattttcccattaataggcgccgtgcacccccttgtggccatttctgggtgtgtgggagggacatctttttcatggggcgtgtcctgaagcccacctcccctcggatttcttcctggcgggcggagggaggagggtatgtccgctgggaaggagttgtgggaaatatgtaggctgagagctttaccctactggagccgtttatctcccccgggtctttgtgagggtgcgagatgacctccttcttcctgaagccctgtgcagggtcctgagccctggggtcctgagagtgggtgcctgaaatggtttcgagtgaggtttggttctcgtgcagccatgtgggggaggtttcagtcttgcgtttcaagccctctggggctggggttgtctggcggtagttttcagtggtattgagaaataggcccgagtgggaaaccccctcagcacctttcttcttataggcatccccgctagcttgggagagctggagggagggtgcttggagcctagtaggtcatggcctgtgacgtggcccttcttggagacttggatagtggtcacatctggaagagatgtaatctgatggggcctctgtccttccaccccttacctatggcattggctggaggggcaggtcagctctcagctgtcaggatgcagctcccaggggtcactgtaatgacttcccaccctcttggctgtctcctgcacctggggctctatggatggaggaaataactttcccagaggtggcctcaggcttggccgcacctggaagtcttcagggcctgggatgggtgtctgaatgggggcgatggcctgactccccaagccactttttttttttttttttttgagacggagtcttactctgtcacccaggctggagtgcaatggcttgatctcggctcattgcaacctccgcctcccgggttcaagcgattctcctgcttcagcctcctgagtagctgggattacaggcacccgccaccaggcccagctaatttttgtatttttagtagagatagggtttcaccatgttggtcaggctggtctcaaactcctgacctcaggtgacccacctgcctcggcctcccaaagtgccgggattgcaggtgtgagccaccgtgcccccaagccactttctggagtcctctcattcttagagggtccaggagctgcccatcttccctgggaccctaccttcgtgggcagagggtcataagggagggggttggttccagctggttttgtttggggctcctgagtccaaggcaggagctggggtctggggtactagctctggggaagtacccgtgtgccacacctctattctggaatcctctcagacatgagactggtttgcagaggtggcagatgccctgtgggcatatcctgccagccccgctcccttctgctattcatggcaccctaggataggggtgtgtgtgtcaggaagtgtcacctaatctggaggagattaggtgatgagagggagcgacagctggcggtggtgggtgccaattcccctggcctggatgggggaggtgtgtggtcagctgcctggccagagaggggcagcgtgggggtgggccaccatctctccagccacagctgggataggagacccccctttcttctcccctcacttttcccaccctttcttaaacaccccacctcattacttgcccccttcgccaccactccccaccaagaaggagaattgctggaaacccaccccccggccagagcccaggttccgccacccagccctcccacagccactcccagtagctaatcctttttccctgttactctctcctagaattttgtagccaccttggctaatgggatgagcctccagccgcctcttgaagaagtaaatatccttttgtgagacccctccccaccctgacctccacatcaatatatcttgccacacatctggccctttcttgaggtctaaccatacccctcttgcttcaaaccagtttaccccaggcccccagacacttagtagcaacccctccaggttcacagcccccgctggcctcccccagtatcgccgctacttccttaactccacctccaacccccctttgcccttccctgtgtctgcccccattttccttcccctcccctccccagctgtgggctgagctagagacggggtcagagagactggagagatggtaggcgtggctgaggtatcggggtgctcccctggatggtgctctgggggggtcctggaagtggaaaatggggttgttaggttttggggttcctgggggggcaagatggcaggcgggggctgtagggttgtcatggtatgattttgggggttctatactactcttcagggaaaagtagggcgctggaggtttaagaggctgtggggagcccccagatctgacccatgatcccatcggccccctcccaggtgtcctgtggccaggcggaaagcagtgagaagcccaacgctgaggacatgacatccaaagattactactttgactcctacgcacactttggcatccacgaggtcagtggggacagtccccaaggccccaatcttaggggggcttaaatgttggggaaggggtggaacctgttttcccacgcatgcgcactgcttcccctggccgcaggccgcccccctgcccctctgctgcgcacttcctagggtcgcctcgccaagccgttgccttggagaccgaggttagcctgaatctctgcaggggcctcgcgccgaaggctggggtgggagagcgcatgcgtgcctggggccttagccagaggtcgggcagggcccactggtctctgccgccctctagtgaccggcggtgggactgcgccccggctgctcccgccctaacagcttctgcacacttcagatctgactgaagacactgaaatcccagaacgaagctggggtggcattctaaggaattttcttttccccctgaggcctttttcataaaattgtggcaaaatatgcataaaattgccattttttatttttagagacggtctcgctctgtcgcccaggctagagtgcattggtgcaatcatggctcactgcagcctcgacctccccggctcaggtgatccccccacttccactttcggagtagctgggaccacaggcgcgcgccaccacgcccagctgatgttcttatttttctgtagagataatcttgccttgttgcccaggctggtctcaaactcttgggatcaagtgatcctccggctttggcctcctgaggtgctgggattacaggcgtgagccaccgctcccagcctgaggacttttaaaagccagggttcactggttcttaggtagcagtggtgaagtccggccaagattggagtttagaccatctaatctgattttttaaaaagggaaactggctgggcgcagtggttcacgcctgtaatcccagcactttagggggctgaggtgggtggatcacctgaggtcaggagttgaagaccaacctgggcaatatggtgaaaccccatctgtatgaaaaatacaaaaattagccgggcatggtggtgtgcacctataatctcagctacttgggaggctgaggcaggagaatcacttgaacccaggaggcggaggttgcagtgagctgagattgcaccattgcactccagcctgggcaacagagtgagattccatctcaaaaaataaaataaaataaaaataaataaatgaataaatataaaagggaaactgaggtgcatggaagaaagcgagagggccgagctctggccctccgagctctcaggacacgctgttctccagctggggatatggggcccctcacggcgtctctgtgccattcttgccctaggagatgctgaaggacgaggtgcgcaccctcacttaccgcaactccatgtttcataaccggcacctcttcaaggacaaggtggtgctggacgtcggctcgggcaccggcatcctctgcatgtttgctgccaaggccggggcccgcaaggtcatcggggtgagtctccagggtggccaggcggggccgggcctgagggatggaggggagcccatcagggctcagggattggatggaggtgatgggggcaggggatgggtctcaccctcccttcttcctgggccctcagatcgagtgttccagtatctctgattatgcggtgaagatcgtcaaagccaacaagttagaccacggtgagcccagaaagaggatgggtttgtgggagtggagggggtgatgccctgcttccccagggccctctgaagagcagtggggtctacagatgaccacagattcagcagctcccaacccatggtcttttgggctgccggccgcctgagaatctgagtgtcaaaatcacaggcttagcaccgcagtcttaaaattagggcaagaagcactctctagtttcttgaatgagtaatagagtcacgtggttggccacggaaggcccacagtgagaagccttccctgtttcccagctgccctcctctgagtttaaccaacactaacttccagagaagtctggacctacaaacacatacatacgtaaatgcatttacattctcgtgcataattttcacgccagtagcatttcataccagcctcttgcccttggcttcttacacctgcttgtcatgtcgtttaacactttccaggatgttgcggcatccgctcttttgcatgaccaccatcataggtacatccccagcatttttttttttttttttttttttttgagatggagtctcactcttttgccaggctggagggcagtggcacgatctcagctcactgcaagctccgcctcctgggttcaagtgattctcctgcctcagcctcccaattagctgggattacaggcgccagccacc[137 bp omitted]tttttttttttgtatttttttagttgagacatggtttcaccatgttggccaggctggtcttgaactcctgacctcaggtgatccatccactttggcctcccaaagtgctgagattacaggcgtgagccaccgtgccatcctgaagtgatttttaaaaagagattattataatgaacgcacgagtccatttgaagcaaattcccactgtgatgtaattttcccggtaaatgcgtctgcttgtgtcttatctaatagataaaggctgttttgagaatgtgatcatgctgttacttattatatcaaaaccacccagttaaaaacaaaatcgcggccgggcacagtggctcacgcctgtaatcccaacattttgggaggccgaggcgggcggatcgtgaggtcaggagatcaagaccatcctggccaacacggtgacaccctgtctctactaaaaatacaaaaaattagccggacttggtggctggcacctgtagtcccagctactcgggaggctgaagcaggagaatggcgtgaacccgggaggcggaggttgcagtgagctgagatcacgccactgcactccagcctgggtgacagagcaagactccgtctcaaaaaaaaaaaaaaaaaaaaagtaacatcacctgatacccagtccacataaaatttctgctcctgcctcaaaaatgtccagaacgatgtatgaattttaaaactgttagaagggttcatggcttctgctcacgcagttctctgaactgaagtggggtccccaggctctagcccccgggggaggtgaggtgaggggcaggcctcccgggggctgacgtggccacccttgtccgcccgcagtggtgaccatcatcaaggggaaggtggaggaggtggagctcccagtggagaaggtggacatcatcatcagcgagtggatgggctactgcctcttctacgagtccatgctcaacaccgtgctctatgcccgggacaagtggctggtgaggccccagcgggacgggtgcagctcgcgtgggctggggtccaggtagaagacgaaaaccacgctcaatttttcccacagacgggacttactgtgggggcttagctgcaaggtgttagaaagccacagcccaagccaggtgtgacagaccctggagggagatggtgcgatgtgggggaggtcgtaggaacaggaaatccgtagcggcgcaatagcccaggtccttaggccccagcaggcctccccgggagaggtgaggtgacggagaggtggatgaagcatacggaggggcagccagggcaggtgtgcccttgctgcgtgtggaacagcagggaggcccgtgtggaaggagggtctagaacggcagcaggaggaggagtggaggtgaggggtgacagggcgtgtgcagattttgtggaggcttatgggaccccgtgcttttcctctcagagcagctagggagggtctgaggatccccagaacctccaagggccgggagctgactggggtgcccctgggtgccctctggcggccgtgtgggaaatagaccagggggcgaggggtgagtgccgctgcgacatgagggtggcccagaccagggcaggaggccacatcttggaggcaagactcagggtagtgttgccaggccccacccttcatgcctcgccctgcccctctgtaggcgcccgatggcctcatcttcccagaccgggccacgctgtatgtgacggccatcgaggaccggcagtacaaagactacaagatccactgtgagcgcggcccgggagctggcgggcggggcctcgggtgggctgctgcgggctcaccccctccctgcctgcctccccagggtgggagaacgtgtatggcttcgacatgtcttgcatcaaagatgtggccattaaggagcccctagtggatgtcgtggaccccaaacagctggtcaccaacgcctgcctcataaaggtgagggggtgggcatggccaggtgccccctgggttgaaaccaaagagaggccatcacctggccctggcatgggactttggggcccagaatgttggcctgaggtctcagagcctgatctgccagccagaggtggtgctagaggcccaggaaagacacttcgtcctttaaatatctttgtgagcgctgctgtgtgagaaccatgcttggcacttggcttctggcggaggaaacacccaaagctggcagctaaagcccacagcccatgcacggaaaggcaggaccccagggcgatgagcggatgcacatgcacgcgggccactgcagaagagcacggggccaggctgggctccgagatgtgcctgaggtcccagctactcgggaggatcacttgggcctgggagttcaaggctgcagtgagctgtgatcacatcactgcactccagctttggtgacaatgttttgttttgttttttccttttgtttttttttacttctgagaccctgtttaaaaaaaaaaaatacggcgatgagtatttgttgagctgggatgtgtgagccgggtgaagctgggtggctgaccgggggatcctgtcggggaggagtaagttgttgagtgggggaggagaggagactacaggggcagggaccccactcgggccaccctcctgagagccaggggaactggcgcagggtttaggttggcatttgtgttgccgtttgaagccatcatgttgttggacttgtcaaggggttggggagacagtggagtggggcgcctgcattctaggaggtctggacagagttagggtggcactgccaggtttgggtgttggagaggagggagcaaggaatctgggctcgaacccacatggtttattgggagccggataggcaggatgcagagtgaaggaggagccgaggctgggtgccagtgagggagggctagcaggaaggggacagcgaggtcacaggccctctgggagcttaagggagggaggaggggatgaagcgaggtggggacgcatcccggagctcgccctctcatgtcctgcaggaggtggacatctataccgtcaaggtggaagacctgaccttcacctccccgttctgcctgcaagtgaagcggaatgactacgtgcacgccctggtggcctacttcaacatcgagttcacacgctgccacaagaggaccggcttctccaccagtgaggcggggcccacagggctgggggccgttcccgagccagggcggaggcgcacccacgtagtggagggggtgacagaaacgggcagaaggaaccatggggacacgcgtgttccagtgtgagctctgccatgtagcagtcacgtggccttgggcaagtgacctgagtgtgcagtgcctcagtttcctcatccacaaaaggctgacacggtccctgtctccaaagctcaatgacagggaggtgactcgcggatagcagtcccatcagctgtcatgggggtgggcattccgacagagggaacgcaagggtggggttggggggggcagcaggccgaggccggctgacccgcccgcgcccccaggccccgagtccccgtacacgcactggaagcagacggtgttctacatggaggactacctgaccgtgaagacgggcgaggagatcttcggcaccatcggcatgcggcccaacgccaagaacaacgtgaggctccgggcagctgggtgggagggtggcagctagggcggggagtgtagattggggggggagtggtgggggaggaatggtggcagcgggggtaggggatgggggcagccggggtgggggatgggggcagctggcgggggcgagcacctctgcctattcccgggtccccaagcccctcagccccatgcctgtctacacagcaggattgcttgagcattcaccggaagttatgggcctggggacccaggctgaaaccctgccctcctggtgcttccactctagacaagggggtcagtgacatggtgatgccagttggaggtgacctctgtcaggctgggagcagggcagacaggtgttggtgtaggtgggctccagggcaagaggcagcccccagtagagtgcacggggttttctagcccagctgggaggcatgagaggagaaaggcagctttttgttttctgctcccctttctttttcctcctgagcacttggcaggagctgccatcacctgagatcagggggcttccgggggagctgggggggcttctcggagacagggtctgggcagagatccagtgtggtgggtctgagcaggcaggaggatggaaggcttggagcctggagtcgccgggagtggtctgggttggaaaagtgggtcccggccgatgggtgcgagggtgggtggcactcagggtagtcatggaatgtggaccctgggacacccacgagcctgtgacagcagcagttgtcaactgggcagttttactgccccctccgctccccgcccccccccaggacgtttgccaccgtctgtggaaacatttgtggttgtcactccggagaaggggtggtcctggcatctggtaggtaggggccagggggctggtaaatgtcctgcagccacaggaccaccccctacaaagactcatgcagcccccgggaccacggcactagctgggaaacggatactggagagggaggaggagtcctcgggcgttggtgactttgtctcatcttcatgtgctggagggtatggggggaggagaggaagtggagacagcaggctggaccattgtgtttcactggaacgtttgcctgaggaggaagtgggcttgggagaggttttcttttttatgaaagaagcaatcactgcattgctgatgggaatcatcctgatggagaaatccaagggcaagggacagcagctgggctctactcctgagtgagtctagtgggcttgggggtgtccatgtggtgctgtcccttggcagggtcagggcagctgctagggtgggaccagcagttggggtctgcagcgtggagatgggcaggaagctggagcccggctcatcgtcgcatagcctgcctgcacccgccccccgccaccacctcctggtgggttccgccctcatgccccacctctccctgcagcgggacctggacttcaccatcgacctggacttcaagggccagctgtgcgagctgtcctgctccaccgactaccggatgcgctgaggcccggctctcccgccctgcacgagcccaggggctgagcgttcctaggcggtttcggggctcccccttcctctccctccctcccgcagaagggggttttaggggcctgggctggggggatggggagggcacatcgtgactgtgtttttcataacttatgtttttatatggttgcatttacgccaataaatcctcagctggggtctggctttgtttcctgggggcaaaggaggtttggggttcctttcgcaggtactgcagtgccagcctcagcagtggggggaccggccttggcacctgctggtggctgccattctgtggatctgcgtctcccgtcccccgtctctaggcctcttgctccccttccttggttccttctcggggtccctgtcctccacagctgtctctcagggtctttgtccaactcttttcatccctctcctgggtctgcgcccctcccctctgcggtacccgtgtcctgcctagtaggggatgggggtggctttccagcacagccagccctcaagtttcccagaacagtctccccacctccccccaacactcgacattgttcctctctggctgttttttcctgttcgggtcccttcaaggcccaactgtgcccagccctctgcagctggggacactgagtgggttgggggtgtatgtttgcaaggatagaatttctcatgggggagtggccctgcttcctcccctagaatggcttggggcttagggctggggacttgccctccatggaggtcagtgggagttgcagctgtaaggtggcagggcctacccatcttacagaggtgaagacgaggtccctctgcctctgctgcagacatggcgtctgcacccacccttccaccctcagggcctggccacggggtcctgggtcccccacaatactgtgcactcgacctggttgacccaggacaccctcctcgttgaacagccctggctacacctgcttcagtgcaactggagccctcaccggcgagtgcctgacacctcggccttttctcttccggaggggcgctcctcagtgtgtttggggtctccctcgctccacgccctccagggggccgcatgtgcacttgccctgcattgcctggcccccgaggttccagggtcccaactgtctactaaccggcttcccgacagggtgagggtgaggtcgcatctacaaccagagccagcgcttccccgccgccaccccttttcttggaatcccgctgcttagctacctgcgggtgtcattggccccgccccatttccccacgctttgaagggggcgagtctccacagacctcctagggggatagacagcagctggtgtgaccccacacacccagtgaggtctctggagccgcggtgcgggaagcggggacccgggtttgaatcctgcccctctggtgtggtgcggcctcttcccacagacttttggcctcagtgttccccgcctgggaagtggggactggccctggtacctggctccagagctgcacccagaggcgatcagcccggtgcgggaacggggcggggtggccgcaactacgggccacggatcctgacccgccctgcccacgatgactatccacatcctcatcctgctgttgctcctcgccttctccgcccaaggggacctggacactgcagccaggtgagaaacccgggtggcagcagggacagggcgggagggagaccgtaaagggcgagcgccctctcccggccgcggaacgggcaggtgatctgtaagcctccccgctggtcttggagtgcttgggtgcccacctccatcacgctccatctctcaattcggtttgaacccggttttctcccacgctccctctccaggcgaggccagcaccaggtcccccagcaccgcgggcacgtctgctacctgggcgtatgccggacccaccgcctggcggagatcatatactggattcgctgtctccaccaaggagccctcggggaaggccagccacgagccccaggacccctacagctatgggcgccgccggtggcgcgaggcggaagcccggctcggttcccaggattccggcctgcagcgagggggctagcgcagtgcccagctcgctgggtgacctcgggcacggctcgtcccctcctcggcttcagtttgcctatctgtatgttggagcttctactccacatttcttctcccctaactccagcccctgaaaccgtcttccccagtccctccccgggctgcgactaggttggacctagaagcacacgggaccaggctgggcgaagaacactgacgcccagagccgaataaacaagagttccgtgtttcagtctctgcttctctgtacctatttcgacctctcagtcgaggctgggtctctaatatacctttctctattagccatgctgcttctccctcacggaagtcccactgtctaccttgaatccaacccgctgtggcgcctttcttgccaactcaatccatgcaccttccgtgggtggttttggcgggccgtcctgacccccaaacatccctcctccctccctggcgtgaaagggctgagatttgctccggcaccctacgcgcctgacgttataatgcacctggggtgggctgcgacctcccagctgagccttgttcctcgaagagacaggagactaagagacaatgagctgagtgaggagcccaggaacccgggttccgaacagctgcgtagaatgcgagcggccaaatggtggagaatctggccgggtaaaaggagacggaggactggggatcgaacggatgtaggggattggacgccgtggctcgaagggggcggggatagaacgcggggattggaaggaggcggggataaaacccgggacctgaatacccggctagggacacgagagagaggaatcggggtttctgggtgacggtgatctcggggtgggcaggactccaaaggcccgtcgacccggtggtggactccttgcactgggattggacatatgcaagcgggagatttggggccggcgctcaaaatcggggggcgggggtggactcgggtttggaccccaggatccgatcagcggacccttgattcaacgtggtaagtactggaccccaggggctcgggctccggcggggcctggagtcctgtgtctagggttgggcgtgcaagcctctccatcacttgtcctcgacgctcgcctccgctcacagcctcagcatcccaggctgcgaggcatgcgcagtgggtgcttccttccccattccctccagcacgggcggggggaggggacgctgagcggatgaatttatagacaccatccccctcgccttggcatgaaaagcggcaatggggtggacagcgtcaatgtctaacaggtgtttgtttcatatgggtctaaaactaatgcttttctcaagaccccgcaactcagcctggaccagtttccctcctccacccacccccgaatcttgagaatcctgtactggggggagggcactgcccccgcaccatgttcttgggagagcaggtaaaggggttaacgcgagctatccctctggcctctctatgcgttcccagaggtcccgaattgacgtccttccctcaaaacctccgggtctacaaaccaggaccctcaagacccttcaggtgcttagagaaggatgagctaggttatgtagtcctgggtcggcgcaaaaaggcagctgaaagcgtgagatcccgggtctgagggaggaggggctggggcctgggcttctgggtctgagggaggaggggctgggggcctggactcctggatctgagagaggaggggctggggcctgggcttctgggtctgagggaggaggggctgggggcctggactcctggatctgagagaggagggactggggcctggactcctgggtatgaaggaggaggaggggctgggggcctggactcctgagtctgagggcggaggggctggggtcctgaagtatgactctgcccgactcagggctccagcgtgacatggctgaagcgcaccaggccgtgggcttccgaccctcgctgacctcggacggggctgaagtggaactcagtgcccctgtgctgcaggagatctacctctctggcctgcgctcctggaaaaggcatctctcacgtttctgggtgaggagcggtgctggtcggtttccttccggggatccaggtttctgcttccgggatgtctgaggctcacttccggcatttcagctggttcatttctgggagactatcacccctttttcttagaattttgatgtctgctcccaggacccctttagcaatttctccgtggctcacttctgggatccacagccccacctgctgagaacctctgctcacttctttcacccaagaggggaactgggccccccaaaaactacccacttccagtttctagaactccatatccttcccttatggtgaaattatcatttcttcctttcatctccagcttcttttgtagttgttgtttctgagacacagtctcactctgtcgcccaggctggagtgcagtggcgggatctcagctcactgcaacctccgcctcctgggttcaagcaattccctgcctcagcctcccaggtagccgggattattggcgcacgccaccatgcctggcttatttatttatttatttatgagacagagtctcactctgttgcccagactggaatgcagtggggtgatcttggctcactgcaaccacctcccaggttcaagcgattctcctgcct[131 bp omitted]ccaaagcgcttgggttacaggaatgagccaccgcgcccggcccaaactcctgctctgtccctgttctggaatgcgcatgcccaatgtgtaaccagcacccatgtctgtcccagggtttctggttctagaactcttgcactgtctccatacagggactccctgcttgtcacatcctctgtgtgtgaactggggtctggaacacctgtggggtcatgattgagtttgaatcctgactccaccgcttagtagctgtgtcatcttgggcaagcacctctcttggagtcgcagtttcccctcgtggaaaacatgggtgttgacagcacctccctcacaggatagccttgaagactaaattaattcttctatgtcctggcccatggcgaggtctgagtgttagcttctgatattgttcttcattcattcaccatatatttatggggcatccggtaagggcctggccctctttagcatggagaacacagcagatatcaacagacagaatcacgcctgggcactgcgggctcacggctttaatcccagcactttgggaggctgaggcaggaggatcacttgagcccaggacttggacaccagcctggacaacatagggagaccccatctctattaaaaaaataaagacaggtcgggcacggtggctcatgcctgtaatcccaacactttgggaggctgagacggacggatcatgaggtcaggagatcgagacccttctggctaacacggtgaaaccccgtttctactaaaaatacacacacacacaaattagcctggtgtggtagtgggtgcctgtagttccaattactcaggaggctgagg[139 bp omitted]aataaataaataaataataaagacagaatcctgcttttatagagttctcattcgagttgggggagaaggcaataaaacagatgagcaaaacagaaggcaataaaacagatgagcaaaatatagggtatggtgacattctatagtgtcatctgatattgatggtgacacatgctatggtgaatgataaatc[144 bp omitted]atatagtgaaaccccatctctactaaaaatacaaaaattagccgggtgtggtggcaggcacctgtaatcacagctacctgggaggctgaggcagaagaatcacttgaatccaggaggcagagattgcagtgagccaagattgcgccactgcactccagcctgggtgacagagcaagactccgtttcaaaaaaaaaaaaaaaaaagggggtgggagccggcggccaggaggatctcctgaagctgggatgcttcagcaggctaaactgaacctctgtggtcttgttggttgtataatctgttccagttggcaaacagccactgccttgaactccgaatccctctcccgcccttaccctgggactccttgggcctcaggccagtctaccaact[131 bp omitted]tccgtctctactaaacatacaaaaaaattagctgggcgtggtggcagtcacctgtagtcccagctacttgggaggctgaggcaggagaatggcgtgaacccaggaggcggagcttgcagtgagccgagatcgtgccactgcactccagcctgggcaacaaagcgagactccgtctcaaaaaaaaacaaacatgtggccatccttttcgtgtgtttaaatacatacatacatagatacatacatatttatagacctataaatatatacatgcacacacatatatatgataacattacatggagaaaaatgcacaattttttttttttttttttttttgagacggagttttgttcttgttgcccaggctggattgcaatggcatgatcttggctcactccaatttccgcctcatgggttcaagctattctccttcctcagcttcccaagtagctgagattacaggtgcctgccaccaggcccggctaattttttgtatttttagtatagacagggtttcaccatgttggccaggatgatctcgaactcctgatctcaggtgatccacccgccttggcctctcagagtgctgggactacaggcatgatccactgcacctggcctttttttttttttttttttttgacatggagtcagtctgttgccaggctggagtgcagtggcgtgatctcgacttactgcaacctctgcctcctgggttcaagtgattctcctgcct[133 bp omitted]gcctcccaaagcactgggattacacgcataagccattgcccctggccttttttttgagacagcgtctcactctgttgctgttgcccaggctggagtgcaatagcaggatcttggctcactgcaacctccatctcctgggtttaagcaatttttctgccttagcctcctgagtagctgggattataggttcccaccaccacgcctggctaatttttgtatttttagtagagatggggttttgccatgttggccaggctggtctggaatgcctgacctcaggtgatccacccgcctaggcctcccaaagtgctgggattacaggcatgagctactgcgcccggccaaaccccagtgttttcatttgtaaaatgagatcatcttagtacttatttcacatggtttggggaggatttaaattgttaatccttgtaaatggcacctggaatgtagtaagtgctcattaaacgttagttatctctctgaggcttccaaaggagtttagttagtaacgcagtgctgttggtcgttcctcattcattccatgccctggtacttctagaaggccttactgagctccagaccctgctctgaatagggatcatttttctttttcttttcttttcttttttttttttttttttgagacagggtcttacttactttgttacccaggctggagtgcagtgtcaccatcacagctcacttcatccctgaactcctgggctcaagcgatcctcctgcttcagccttccaagtagctgggactaaggtgtgtgccactgcgcctaatttttttttctttctttttttttttttggagaccttgtcttgctctgtcacccaggctggagtgcagtagcgtgatcttggatcactgcaacctcagcctcccgggctccagcgattctcgtgcctcagtctcccaagtagttgggattacaggtgcctgccaccatgcccggctaatttttgtatttttactagagacggatttcaccatgttggccaggccagtcttgaactcctggcctcaagtgatccgcctgcctcagcctcccaaagtgttgggattacaggcgtgagccaccgctggtcttgaactcctgggctcaagggattctcctccttgacctcccaaagtgctgagtttacaggagtgagccaccacatccggactgttctgcctttgacagcctccccttccaggtcctgcctcagaatatcctcctccagggagccctccctgatgccctcgaactgtaacttggcagcacagggctcctcctatttcttgccctatagcaattaatacttacttcattctggtctgacctcgctgagggcaggacctggatctctctgttccctactagatcttgagcctccagctcagggctccgcactgggtgctcagtaatgtctggggatggcacagaacaggggctcagaggagagggcagatgattcaatggatgccctttcctccccacagaatgactttctcaccggtgtgtttcctgccagccccctcagttggcttttcctcttcagtgccatccagcttgcctggttcctccagctggatccttccttaggactgatggagaagatcaaagagttgctgcctgactggtgaggtccccccactccagcccagtaacccccaatcactctcccttcacccagtaagttcctctgtcattgtggtgtacctgctaaagaaaagtaacctctgagacttacattgggtcagattaataaaggcatggcatgaagaaaaaggaggtgaggccgggcacagtggctcacccctgtaatcccagcacattgggcattgggaggctgaggtgggtgtatcgcttgaggtcaggagttcgagaccagcctggccaacatggtgaaaccttgtctctactaaaaatacaaaaattaggccaggcatggtggctcatgcctgtaatcccagcactttggaaggctgaggcacgtggatcaactgagatcaggagttcaagaccagcctggccaacagggtgaaaccctgtctctactaaaaatacaaaaaattagctgggcgtggtggcaggagcctgtaattccagctactagggaggctgaggcaggagaatcgcttgaacccgggaggtggaggttgcagtgagccgagattgcgccattgcactccagcttgggtgacaagagcgaaactccatctcaaaaaaaaaaaaaaaaaaaaaaggtgtgagctttgctgggcacagtggctcatgcctgtaatcccagcacttttggaggccaaggcaggaggatcacttgagcccaggagtttgagaccaacctaagcaacatggtgaaaccccgtctctactaaaaataacaaaaaattagccaagtgtggtgtcacttacctgtggtcccagctacccaggaggctgaggtggagatcacctgagctcaggaggtcgaggctgcagtgagctgagatcatgccactgcattgcagcctgggcaacagagt[212 bp omitted]aaggcaggataatcacttgaacccggga[136 bp omitted]cgttgttgattgtcaaggccttcatctgtaaaatgaggtatgaataattgcttcttagtgtgcttggaagaattaatcaaaatcctgcctgtcggcgggatgtggtgactcacacctgtaatcccagcactttgggaggctgaggcgggtggatcacctgaggtcaggagcttgagaccagtctggccaacatggtgaaactctgtctctactaaaaatacaaaaattagccgagtgtggtggcaggtgcttgtaatcccagctacttgggaggctgaggcaggagaattgtttgaacctgggaggcggagcttgcagtgaggcgagatcacgccactgcactccagcctgggcgacagagagagactccgtctcaattaaaagaaaaaaaaatcatgcctgtcatatagtcagtagagtgccaggaggtcctcatgggagtggctgcattatttttattgagttattgtgatcttcaggaagggtctgaaaactgggtgcaggtgagatgtcaggtctagttctcggatgagtcctcccggggaggaaggtccacattttgtgcagatggccccaaagaacagacccaggatcagatgtagacaattccaagacggaggccgggcacagtggctcacacttgtaatcccagcacttcggagggctgaggcaggaggcttgagctcaggagttggagaccagcctgggcaacatagagacccctgtctctaaaaaaaaaaaaaaaaaaaaaaaaaaaaaaaaaattcctggaacgctagatttacccccagtctacagagggaaagtgatttgacccaagtcctccaggtgacatttgcaaactttgcaaacaaacatgttgatttaatgtagctttagaccagcttttcctaaatttaagcttgtattggaatcacctggatgggttgttaaaccgctgactatggccaggtgctgtggctcacacctgttatcccagcactttgggaggcccaagtgggtggatcacctaaggtcaggagttcgagagccgcctggccaatgtggtgaaaccctctctactaaaaatgcaaaaaattagctgggcgtggtggcgggcgcctgcagtcccagctactcgggaggctgaggtaggagaattgcttgaacccaggagatggaggttgcagtgagccgagatagtgccactgcactccag[134 bp omitted]acacggtgaaacctcatctctactaaaaataacaacaaatagccgggcgtggtggtgggcacctgtattcccagctactccggaggctgaggcaggagaa[131 bp omitted]caccctgagagattctggcttgttaggtcttaaaggcgcccaggaatatgcatttcgaacaagctcccaggcagtgctcccaggagccacagtttcagaactattgccttagagtagtgatagctggaaggaaaaagtgtcccctcaatagaaataatggctgtcatttattaaacacctaccaacttccatggaaagtgactttggaagcttggtgctgccacaatgggagggggctggagggggtgacagagctcacacctactaaaatgacaaaaatgggtttctctgtctgacagccaaaagatcagcgcaggggctggagggggctggaagggagggaggttctgaggccaggagacccaggcccagcctctgtttctctccccgcaggggtggacaacaccacgggctccggggggtcctggcagccgcgctgtttgcctcgtgtttgtggggagccctgatcttcacactgcacgtggccctgaggctgcttctgtcctaccacggctggcttcttgagccccacggagccatgtcctcccccaccaagacctggctggtatgggaggggcatagccctgctcaggctctcctgggacccgcttatctattcccctctctctgggtctctgtccccctctctctgggtctctgtccctctctctctgggtctcttccccctctctttctgggtctctgtcctcctctgtccctgggtctctgtccccctctctctgggtctctgtccccctctctctctgtgtctccgtccccccctctgggtctctacccccgactctctctgggtctctgcccccctctctctctgggtctctgtccccctctctctgggtctctgtcccctgtctctgggtctctgttcctttctctcttggggtctccgatgctcttaagtctctgtgtccttctctttgggtttctgtcccactgtcgacccctgccccgtcaactccctggctccggtgaggggttaatgacccggtaactcctcctccccaggccctggtccgcatcttctctggccgccacccgatgctgttcagttaccagcgctccctgccacgccagcccgtgccctctgtgcaggacaccgtgcgcaaggtgggcctgggagcgcgcagacgggctggggcggccggggcgggccgggggcgtgacctgccctcttctcccctttagtacctggagtcggtccggcccatcctctccgacgaggacttcgactggaccgcggtcctggcgcaggaattcctgaggctgcaggcgtcgctgctgcagtggtacctgcggctcaagtcctggtgggcgtccaattatgtgagtcccgccaccgccaccaacgccccacctgaagggctaaggttgtgagctcgcctgctaaacttgcgagttatacgccctgccccacgacacgcccacaacccacacgcccccagcccccaagggtcaataccctgagccccgctcacatacatctatatcctaacctccacatttatatatatataaaaatatatatgtatatatatttatttatatataaatatatagtgtatatataaatatatatatttatttataaatatatatatttatatttatatacaaatattaatatttataaatttatatataaatatatttatatataaatttataaataaatatataaatattataaatatattaaatatatttatttataaattataaatatatatttatttataaattataaatatatatttatttataaattataaatatatatttatttataaattataaatatatatttatttatttataaattataaataaatatatatttatttataaattataaataaatatatatttatttatatataggcttatatatttatttatatatatatgctcataacatatatatgctctctctatatatttaatgttgaagtttggggtatagatgctccagtattctgagcttcacccttgatcttccaaagtttgaaccagaattccaggacttagccctggtgcaatgtctcacgcctgtaatgccagcaggttgcgaggcca[134 bp omitted]ctgaggcgggaggattgcttgaacccaggaggcagaggtggcactgaactgagatcgcgccactgcacttcggcctgggccacagagcaagactctgtctcaaaaaaaaaaaaagaaaagaaaaaaaaaaagacaaaaccaaaggagttgaatggtgaggagtggtgggagaggcctgaactccagactgaggatcctggactctttcctgggggtactagggagccatgggagggtttggagcagggaaggggcagggtcagctttggtgtgggggaaagactggagggcgggaggctgcagaggaagctaccgtgagacctaccattgtaggtcattgagacactgggctgggatgagaaaagctgcagcaagagtgagaggggaagggaagagggtccccggcagagccccacgaggcagctatgtggaagcctcagttggtcaaacccagcgaaggggacgaaatatctggagaagtaaaagggaatgcaggccttgcttttctggttaaatatttttttcttcacacttttggacaagattctgtttacacacacacacacacacacacacacacactcatttctttcttcccttccttccctccctccctccctcctttcctaccttctttcctgcctgcctgcctgccttctctctctctttccttcctttttttctgtctccttccttcctttttttctttgagatggagtctcactctgtcgcccaggctgtagtgcactggcaccgtctcagctcactgcaagctctacctcccaggttcacgccattctcctgcctcagcctcccatacctggctaatttctttttttttttttttgtatttttgtatttttagtagagatggggtttcaccgtgttagccaggatggtctcgacctcctgacctcgtgatccgcctgcctcggcctcccaaagtgttgggatttacaggcgtgagccaccatgcccggcctctttctttctttctttctctatctttctctctctccccctccctccctttctgtctctctctcctccctccctccctccctccctccctccctcccttccttccttccttccttccttctctctttctctctctttcctttttctttcttggaaggggtctcactctgtcacccaggctgtagtgcagtggcgtgatcaaagctcactgcagccttgacctcccagactcaagccatcctcccatctcagcctcctgagtagctgggactacaggcatgtgcccctaagcctggctaatttttaaattttttgtagacatggggtcttgctatgttgcacagactggtctcaaactccgaggctcaagctatcctcccacctcagcctcccaaaatgctgagataagaggtgtgagccactgcgcccagcctgtatattttattgtacctccaagccaactgccagtgacacacgcaccatttttttatgtacaacaacaacaacaaaaaaccctacaagagcagctaaaccgtgacacagtgctttcttttgtgtttttcattgtttgaattttatcatggtattggcaaggccacaattttcatgtatttacacatatgtatattatttcacatatttattgttttataaattttacatttatgttctgtttttcttttttgggggggacggagtttcactcttgttgcccaggctggagtgcaatggtgcgatctcagctccttgcaacctctgcctccccgactcaagcgattctcctgcctcaggctaccgagtagccgggattacaggcgtgcaccaccacgtgtggctaatgtttgtatttttagtagagacagggtttcatcatgttggccaggctggtcttgaacacctgacctcaggtgatccacccgcttagcctcccaaagtgctgggattacaggcgggagccaccgtgcccagctgtaccttgttatttccaccagctatgtaatattccactgccggagtataacagggtttagctaactgatcccccatggatggatttctaggtgatcgctagttactgactacgatggctgacttctttggctctatcctccctgcctgacgcaggagcatctggggccttccctgtcctactgtccctcccccaacaggccccagcccctcactgtgtgtctccccaccccgctcccaggtcagtgactggtgggaggaatttgtgtacctgcgctcccgaaatccgctgatggtgaacagcaactattacatgatggtgagaaggggaggggtgaggttcataggccccaggtctagggttggggggtacctgggcggaatgtgacggtcatgctcagtgacctggatctagacgcgccatctgggattcatcattccaccctcttttggggtcaggacctgtatttgggtcagtggctccatcgggggcaaacctgaccctgggtgttttgccatcccctctcctggtccccaggacttcctgtatgtcacacccacgcctctgcaggcagctcgcgctgggaatgccgtccatgccctcctcctgtaccgccaccgcctgaaccgccaggagatacccccggtgagagggccccagtgggttagggatggaggtgtggtcctgtggcctttgggccacgtgggtcctggaaggcagctcacagcccacggtttcctgcagactttgctgatgggaatgcgccccttatgctctgcccagtacgagaagatcttcaacaccacgcggattccaggggtccaaaaaggtgagaccctctcctgtccccactgatggaggcagaacaatatagtggctaagagcatgttttctggagtccgcctgactgagctgggaaccattgcttccttgctgtgtgaccttctgcacgttattaccctctctgagcctcagcttccactaaagtgggataataattgtacctaggggctgggcgcagtgactgatgcctgtaatcccagcactttgtggggccgaggtggacaattgcttaggccaggagttcgagaccagcctagggcaacgtagtgagatccggtctatatacaaaatttaaaaattagccaggcatggtgatatgcacctgtggccccagttaatcgggagcctgaagtggaaggatcacctgagccccggaggttgaggctgcagtgagctgagatctcaccactgcactccagcctggcgacagagcgagaccttgtctccaaatactaagtaaataaaagtcctagggtgctgatgattactagggtactttgaacaactgacgacacctaagaagtatataataaatggtcactatttttatgtgtctggccttcctgcccccatgcttctgccaacgccacccctagactacatccgccacctccatgacagccaacacgtggctgtcttccaccggggccgattcttccgcatggggacccactcccgaaacagcctgctttccccgagagccctggagcagcagtttcagagaatcctggatgatccctcaccggcctgcccccacgaggaacatctggcagctctgacagctgctcccaggtaagggtcaggggtcaggggtcaggggctctcagaggccgccagtgtcctgagactgtggaagggcagggtggggccaggtggcggctgggcaggatggactcaggcacatcccgggccctccaggggcacgtgggcccaggtgcggacatccctgaagacccaggcagcggaggccctggaggcggtggaaggggccgctttctttgtgtcactggatgctgagcccgcggggctcaccagggaggacccggcagcgtcgttggatgcctacgcccatgctctgctggccggccggggccatgatcggtgagtgagtcttgggatggggcccccagatgtggcacccgagaatccagtatcagacctaggacccctgacagtagacagccagaccctggagcccacacctgcagagtctgtagaccaggggctgcatagagctgaggaccccagacccagtgctttgggacctggagacctctgacctggggaacccctcaacctgggacccaagacctataaaccagacccagtgacccccaaatctgagactcccaaacccctgagctggaccctccgacccagagaactcagcatcacagacccagagaccccagatctgaggaccaccaaacccaggacccctaggcccagggaccccagacttggcaacctcagcctcagaacttgaaccattcaatcctcaggccttaatgcaggcaccccaaatccatggccctagacccagacttccagacctagagattctcaggcctggcaggcatcactgaattcctaggccccaggggggtcccgctgacctcccagcacccccaaaagccttgaaccttcctcggcaagtttcctaaaaatctccaaactccagactgggcatggtggctcatgcctgtagtctcagcactttgggaggctgagaggggcggatcacctgagatcaggagtttgagaccagcctggccaatatggtgaaacctcatctccactaaaaatgcaaaaattagctgggcatggtggtgcatgcttgtgatcccagctacttgggaggctgaggcggga[133 bp omitted]aaactctaaatcccagacatgtcttggagacctccagggccactactggggacccccaatggtcctagagatccccataccagcaccccaatggattcccacatcttcccatctagaaaaccccctcaagtcccacagaaagcactctgaggtccccgtgcccctcgctcttggtgacccatctgaactctccctgacagctggtttgacaaatccttcaccctaatcgtcttctctaacgggaagctgggcctcagcgtggagcactcctgggccgactgccccatctcaggacacatgtgggaggtagggcggccagccctccctggttctggggacccctgccccatctccaaagaccgtcctctccagcgccttagtgtcagaagaaaaactgaggcttggccgggcacggtggttcatgcctgtaatcccagcattttgggaggccgaggtgggcggatcatgaggtcaggagttcgagaccagcctggccaacatagtgaaaccctgcctctactaaaaatacaaaaaaattagccaggcatggtggtgtgtgcctgtaatccctgctactcgggaggctgaggcatgagaatcgcatgaacccgggaggtggaggttgcagtgagctgacattgtgccactgtacttcagcctgggcgacagagcaagaatacatctcaaaaaaaaaaaaaaaaaaaaaaaaagaaaagaaaaactgaggctcagggagaggcagaggctggcccagggtcacctggcaaagaaaggggactgggatgaggaccttcctttgatgagttggtaactggggctcaaagaagggaagtgattttcccagagtcacacagcgaggagttacagagcaagaagatgactccaggctgggtgcagtggctcatgcctgtaatcccagcactttgggaggtcaaggcaggaagatcaattgagcccaggagtttgagactagcctgggcaacataatgagaacctgtctacaaaaaacgttaaaaaaaaacaaaaaaaacaaaaccagccagtcatggtggtacatgcctgtggccccagctactccggaggctaaggcaggaggatggcttgagcccaggagtttgaggctgcagtgagttataatttcaccactgcacaccagcctggatgacagagcaagaccctgtcaaaaaaggaaaagaaaataaggacagtaaacaccagttgagtattggtgttagtcctgttcttgatgaacatgaacctgagaccgcatctgtgaatatcagaggtttctgtttctcagggactgccccctacccgaaaaagggctgcatgaaaagaggtcccgggttagatggcctcagtccacagggaggaagggactctaacagcctctgtttgcccacagttcactctggctacagaatgctttcagctgggctactcaacagacggccactgcaaggggcacccggaccccacactaccccagccccagcggctgcaatgggaccttccagaccaggtgaggctgggtttctgggcctctcctccaagtcccaagattcctagccttgacttcaaactcatccccacccctaatctgaacgtgaaaatcaaccccattcctacccccaacccgaaacccatgcttcccccacccccaaatcaggccatatgcatccacaacctcaaaccccaacacgaacctcatctccagccccaactccaaccgtcctcccactgccaatcccatcctcaaccccaaccccatctctacctgtttcagactcaaaaaccaccactgtccaaccccagcaccaacccctactccattttccttccaaatccatctccatacccaatcccatcccaacaccacctgaattcattcccatgttcatcctaactccaccccataccaaaccctaaccccatacccaaccccaaccccatcctgtactcagccacgaccccacttccaatgacaacccatgcccaactcatcccatacccaacctcaaccccataccccacaccaaccccatcccgtactcagccacaaccccacctccaaccacaacccatgcccaactcgaattcacttcccatacccaaccccttccccgttctattcccaaaccactctcagtccctcctccatccccatccccaaccccagcttcaactgtggcccaaccccaatcttgttccagtctacacatgccatccctatccccatttttttttttttttttgagatggagtcccgctctgtcacccaggctggagtgcaatgacacgatctcagttcactgcaacctccatctcccaggttcaagcgattctcttgcctcagcctcctgaggagctgggattacaggtgcccactaccacacccggctaaatttttttatttttaatagagatgaggtttttccatgttggccaggctggtctcaaactcctgacctcaggtgatccagccacctcagtctcccaaagtgttgggattacaggcgtgagccaccgcgcccggcattttttttttgagacggagtcttgctctgtacccaggctggagtgcagtggtgcgatctcagctcactgcaacctctgcctcctgggttcaagcgattctcctgcctcagcctcccaagtagctgggactacaggcacgtgccaccacggccagctagttttttgtatttttagtagagacgaggt[139 bp omitted]tcttctcttctttgtccccatttccatattctgccgcaaccttaactccacatccacctccgcttccagccttattcctggctttcaccctacccccatctgtaaccccaactactcctcttccctcctcctctggcagatccactcctccatctctctagccctgaggggagccaagatcttgtctgaaaatgtcgactgccatgtcgttccattctccctatttggcaagagcttcatccgacgctgccacctctcttcagacagcttcatccagatcgccttgcaactggcccacttccgggtcagttgggttccccatccacagcccccgcagggtctcagtccacctgagcccccaagacctgcccctccacggttccttgtggtcgctgccattgtgggtcggccatcttgaattctctcttccaaccattcttgggctggctggaggaggctggaggtctggacagagataggtcaagtctgtaagatctcctgagcccagctgacagactcctcttctcctccctgtcccccaggacaggggtcaattctgcctgacttatgagtcggccatgactcgcttattcctggaaggccggacggagacggtgcggtcttgcacgagggaggcctgcaactttgtcagggccatggaggacaaagagaagacggtgggtgcagccctcgcttgaggcttcagttatttctgtgtactcactcatccacttgcaaacgttgatgggacctactgaagccagcctccacgaggagcacaagggacaagggatgaatcggacctggcctctgacttcaaagagctcactgatggggggagacagcccagcatagtgtgatatctgctttcatggtggtctcacagggcactgggggtgcacccaagaaggaaccccatttctttttttttgagatggagtcttgctctgttgcccaggctggagtgcagtggcacaatctcggcttactgcaacctctgcctctcaggttcaagcgattctcatgcctcagcctcctga[224 bp omitted]ctctttgtgacttgtgaccttcctttgcacccctgtaccctctctgcccagatcccacctgccctgcacctcttctcccttgccctacacctagccccgcacctacaaggtattgtggttccatggaaggagtttggactctggggccagacacacctaggaacccgcctggctctccctggctgtgtgaacctggccaaatgatttcccctctctaagcctcagttccccatctgtaaaatggggttgatattcccaccttgcagggatgtggcaaactcagttgaggccagatgtgccgcaggcccagccctaagtcgacttcctgtctttccatgacctgtgacctccctggggactgcaggacccacagtgcctcgccctgttccgcgtggcagtggacaagcaccaggctctgctgaaggcagccatgagcgggcagggagttgaccgccacctgtttgcgctgtacatcgtgtcccgattcctccacctgcagtcgcccttcctgacccaggttggggcacagggaaagggttagagagggaagtgggagaccatggaagaagggagaggtttcagggaaggagggtgatgttgaaaaaggacccatcaaggccgggcacggtggctcacgcctgtaatcccagcagtttgggaagccgaggcaggcggatcacttgaggtcaagagttcgagaccagcctggccaacttggcgaaaccctgtctctactaaaaatacaaaaattagctgggtatggtgacaggcacctgtaatcccagctacttgggagggctgaggcaatagaatcccttgaacccgggaggcggaggctgtagtgagctgagatcgcaccactgcactccagcctggacgacagagcaagactctgtctcaaaaaaaaaaaaaaaaggagggtgatgttgagaaaggatgcgtcagcagagaagtcagttgtgggggggcggcaaggcagaaggcggagaggcaacgggacaacgggagcagacaaaaggggagagggtcagtggggtggggataagaggaaagggcgtggtcagaggaggggcgtggtccgagggagaagaggagagggacgtgggtgtgggtggtgagacgagtgaggggcgtggccagatagggcgtggtcaggagaagggcgtggttagggagaaggaggcccggatttacgggtaaaaaaaaagccagggatgcagggagtgaagtggagccaagggccggaactgcagatctctgtcctgcacatgtgatgggctcctgtcctcaggtccattcggagcagtggcagctgtccaccagccagatccctgttcagcaaatgcatctgtttgacgtccacaattacccggactatgtttcctcaggcggtggattcgggcctgtgagtggagctgggcgcgctggcccccagaggaaagagggggctggggggcctgcactcctgcatagtgggggtggaggggaccggagctattttcttcccttcactctttccgtctccaggctgatgaccatggttatggtgtttcttatatcttcatgggggatggcatgatcaccttccacatctccagcaaaaaatcaagcacaaaaacggtgagacaaacgtgtatacccaccaactccctctttcctcaggaaccaggagtctgggcccccagcccctcctccctcagacccaggattccaggccccagcccctcctccctcagacccaggagtccaggcccccagcccctcctccctcagacccgggagtccaggcccccagcccctcctccctcagacccgggagtccaggcccccagcccctcctccctcagactcgggagtccaggccccagctcctcctccctcagactcaggaatccaggcccttagccctcttgtttctcagcctccaggatcccatctcccagcttcccctggctctgacctgttctccttccaggattcccacaggctggggcagcacattgaggacgcactgctggatgtggcctccctgttccaggcgggacagcattttaagcgccggttcagagggtcagggaaggagaactccaggcacaggtgtggatttctctcccgccagactggggcctccaaggcctcaatgacatccaccgacttctgactccttccagcaggcagctggcctctccaaggaataagggtgaaattgccacagctggctgacacaggacaggggcaactggtttggcaaccccacatccaggccaataaagatgtgtgagctgggtgtgtggtgtctgctatgctcttgggcagggcaggggtagaagaggtaaggaccagggtggaggaggacagaagctcccatccattcccaggcccagccagggattcccagttgcagtcacagcttcaaccacagcccgcaacacctgcccagtgtacttcatttccagcttcactcataccaaacccaaccctccaaggccagtgccaatcaaacacaacctcacaagttctcctgagcctaattcctgctgccccaacaccactgtccacctcaaatccatctccaggccgggcgcggtggctcatgtctgtaatcccagaactttgggaggccaaggtgggcggatcatgaggtcaggagatcaagaccttcctggcgaacactgtgaaaccccgtctctattaaaaatacaaaaaaattagccgggcatggtggcgagcacctgtagtcccagctactcgggaggctgaggcaggagaatggcatgaacccgggaggcggagcttgcagtgagaagaaatcgtgccattgcaccccagcctgggggacacagcaagactctgtctcaaaaaaaaaaaaaaaatccatctccaaacctaaagatccagccaccccaattgacaatccccaaacgaacccacgaaaatttttattacccaaccccaactccagccatttctttttctttttctttttttgagagagagtcttgttctgtcacccaggctggagtgcagtggtgcaatcttggctcactgcaatctctgcctcctgggttcaagcaattctcctgcctcagcctcccgagtagctgggactacaggcatccgccaccatgaccggctaatttttttttgtatttttagtggagacgggttttggggtttcatcatgttggtcaggctggtctcgaactcctgacctcaaatgatccacccaccttggcctcccaaagtgctgggattatgggcatgagccactgtgcctggcctactccagccatttcaacctcttcctcaatgacggattcagctcccataactaggaaatgcactgcccagtgcacaccaccctaacgctgccatcattccagcaatcagcaactccatgatgccacaccccactatacacaacaactcaactacagttcgaaccacacaaccaacacaacgtccaactccaagctccaccatccccaccaaatatcccttctcatttccaccataacccacactttaccttgacccatagtgatgactttatttttatttatttatttatttatattttaagacggagtcttgctccgtcgcccaggctggagtgcagcggcgtgatctcagctcactgcaagctctgccttccgggttcatgccattctcctacctcagcctcccgagtagctgggactacaggtgcccgccaccacgcc[182 bp omitted]tgtgctccaccacccccaccattacaatctccaccagcccaactacagccatcaacaccaaacccaatcacccaccccaccaataccacggttccaacgcgccatcaatctaaccctcactgcttctgagtcaaacaataatacaacccaacaacaaaatcaaaattctaaatggctcaacctctaccagcccaaccaccccagccagactgccaactctgtgatggtttaaaaaatgtccacaagtgggggctgggcacggtggctcatgcctgtaattccagcactttgggaggcggaggcgggtggatcacctgaggtcaggagtttgagatcagtctgaccaacatggagaaaccacatctctactaaaaatacaaaattagctgggcatggtggtgcatgcctgtaatcccagctactcaggaggctgaggcaggagaactgcttgaacccgggaggcagaggttgtggtgagccgggatcgcgccattgcactccagcctgggcaacaagagtgaaaccccgtctcaaaaaaaaaaaaaaaatagtgattaggtcacaaaagacattgtggctttcttttggccgggcatggtggctcacacctgtaatcccagcactttaggaggctgaggcgagctgatcacgaagtcaagagatcgagaccatcctgaccaacatggtgaaaccctgtatctactaaaaatgcaaaaattagctgggtgtggtggcatgtgcctgtagtcccagctactcaggaggctgaggcaggagaatcgcttgaacccgggatgcggaggttgcagtgagctgagattgcaccagtgcattccagcctggcaacagaacaaggctgtgtctcaaaacaaaacaaaaaacaaaacaaaacaacacaagacattgtggcttccttcttgctctgtttctcaatcacttgctctgggggaagccagccaccatgtcatgaggacactcaagctgcccatgaagaggcccacgtggtaaagaactgagacctcctgccaacagccagtgaggcacacatgagtgagccatcttggaagcagatcctccagtcccagtcaagccttcagatgactgtcacccggctgacagcttaaccacaacttcatgagggacacggagccagaaccaccttagctaagctacttttgatttcctgacttttaacaactatgtgagataataaatgtttgttaattcaagttgctatactttggggtaacttttttttttacacaggaataaagaatacaaactgcaaacacctcagcctcaaccctcatattcttttttgaaatttgcttttatttttatttatttttttgagacggagttttgttctcgttgcccaggctggagtgcaattgcacagtctcggctcaccacaagctccacctaccccggttcaagagattttcctgcctcagcctctcaagttagctaggattacaggcaggcaccaccatgcccggttaattttgtatttttagtagagacggggt[136 bp omitted]aggctggagtgcagtggtgcaatctcggctcactgcaacctcctcttcccaggcccaaatgattcttgtgcctcagtctcccgagtagctgggattacaggcgtgagccactgcacctgaccaagaaatttatttttggttggaatactgcctggcgcaatctcggctcactgcaagctccgcctcccgggttcacgccattctcctgcctc[225 bp omitted]ggtcctcaggggtacagaattggattaatcataattgctggtccttggcacatactattattatgtgtaccacttcttaagctattatctcttggcttcaaatctatttcccagcactgggctttgggtaactgggaatgggactctgaaaaccccactttcactttgccaagtggtgtgttagcctctgccaatagggggtgccagactgaccgtagagcctgaaggaggaaaagggttcttgctccttcctgtttgctctctgcttacttcccgttggtttcctgttctcatctgcgtcagcaaagcttcttcaccctgtccaaggcagttctttcctgtagcagcagctaaatccaatttgcagtttttccaaacttgcacatcctcagagatgccagaccatttggggatgccagaccagcacccctgcctgagaaaattccagtctcgggccgggtgcggtagctcacgcctgtaattccagctctttgggaggctgaggcgggtcaatcacgaggtcagaagatcgaggccatcctggctaacacggtgaaatcctgtccctactaaaaatacaaaaaataagccgggcatagtggcgggcacctgtagtcccagctactcgggaggctgaggcagggcaatggcatgaacccgggaggctgagcttgtaatgagccaagatcacgccactgcactctagactgggtgacagagcgagactccgtctcaaaaaaaaaaaaaaaagaaagaaaattccagtctctagtgatcctcctctgagctcagaaacaccagcaccatctgagcagtgcctcctcttcagagcctcagtttttttttttttttgagacagagtctcactctgtagcccaggctggagtgcaatggcgtgatcttggctcactgcaaactccatctcgcgggttcaagtgattctcttgcctcagcctcccgagtaatggattgcagacgtgcgtaaccacgcccagctaatttttgtatttttagtagagacaggttttccccgtgttggccatgctggtcttgaactcccaacctcaggtgatccacccgccttggcctcccaaagtgctggaattacaggcgtgagccactgggcccagcccagaggctcagttttatgtccactggctcctgatccaaatgtatagtttttaataactctaacctttgtctttgtttttcataccctagtgagataggaatttggcaagactggtttccaagacaacaggacacaagacctcactcataagacagaaaacagcaaaagaaactggctaaaaccagctagaaccaagaggacaatgaaagggacctctggggccgggcccggtgcctcatgcctgtaatccctgcacctagggaggccgaggcgggtgaattacctgaggtcaggagttcgagaccagcctgaccaacacggagaaaccctgtctctactcaaaatacaaaattagcccggcgtggtggtgcctgcctgtaatcccagctacctgggaggctgaggcaggagaatttcttgaacccgggaggcagaggttgtggtgagccaagatcgcgccattgcactccagcctgggcaacaagagccaaactccatctcaaaaaacaacaacaactaaaaaggaagtgacgtctggttactttcactgctcattatatgctaattgtaatgcattaacatgctaaaaacactgccaccagcaccatgacagtttacaaatgccatggccatgctgaaaagttaccctgtgtggtctggacggggtgaaagcccaggttctgggaactccctgcctcttatctagaaaacccatgtgtaattcaccttttatttagcatatattcaacaactaaccattaaaataaccaaccaacgatcctcagagctactctgcctatgaggttgctactcttactttcctttctttctttttttttccaattgtaaagtgctgatcctgtttatttggcaggaaaacgagacaatccagcagcccaggagggacaggtggacttaatcctcctcctcgtcgtctccagccccaccctcaccctggcccttcttggcgttcttcctcttcacgcggccggggcggccaccccatagggagagcgcagagacaagtcgatgcgcttctgggaatccaggcggacaatgaaggacgggatgttcgccacctgattgcggaccctgacacggcgctggcggatcagtacgccagcgtggtggatggacttggccaagcccagcttgaagacctgggtctgtaggcgtctctctaagaaatcctctatcttcaggcccaggatgtaatccagcttcgtcttgccctcatccagcaccccaatgcggagcagccgccgcagcaggacgttgccttcaaacagacgccgtgggtccttctcatcaagcgtcagcagttcccgggcggccttgcggatgttggccaaggtaaatttgaccctctagacctcacgtttgttccggaacccatactcgccgatcagcttcagctcttggtcgagacgagatttctcgaagggtctccgcggggtcacataagttttgtgacaaacccagctccgggccactggcatgttggctccgcttccccgtctgcgcctgagtgcaggacccgttcactgagaaagagctcctttctttttcttttcttttttccttttcttttttttttttttttcttttttctttttttttttttttgagacagtctcgctctgtcgcccaggctggaatgcactggcgcgatctcggctcactgcaacctccgcctcccgggttcaagcgattctcctgtctcagcctcccaagtagctgggactacaggcgcccaccat[174 bp omitted]acctgtctcaggccttttctcgtattttacttttctgctcttagtgccaaaatgcatgcttatgacgcttatttcactgttggactggtagcatttcttctggctatttgagcaatttttgctattctgtatcaggtagggcactttccttgttttgaattctttattttggagaggaacccctttgttctgactctgggatgccggagtcacattgttccatagcctcagttgtgcctttggggttcactgttggccaccctcaggatgctccagggttttcggcatttggtgtggggacccttggtgactgatatctggaggccccaggtcttttggtatttggtgccctggattcaggttgcgtggttgtactggtagccagactcaaatttgttttttttgttgtacggagtctcactctgtcgcccaggctggagtgcagtggtgcaatggctcactgaaacttccgcctcccaatttcaagcgattctcctgcctcagtctcccaagtagttgggactacaggcctgcaccaccacacccagctaattttttttttatttttatttttatttttttttttttttgagacggagtcttgctctgtcacccaggctggagtgcagtggcgggatctcggctcactgcaagctccgcctcccgggttcacgccattctcctgcctc[224 bp omitted]ggccaggctggtcttgaactcctgacctcgtgatctacctgccttggcctcccaaagtgctgggattacaggtgtgagccaccgtgcccagcctgtttgagaccgagtttcactctgtcgcccaggctggagtgcagtggtgcaatctcggctcactgcaacctcctcttcccaagcccaaatgattcttgtgcctcagtctcccgagtagctgggattacaggcgtgagccactgcacctggccagaaatttatttttggttggaatactgcctaggtcattacaaactggaaaaccagaaattttagcctaaaaatagttctttgcggccaggtgtggcggtcatacctgtaattccagcagtttgggaggccgaggtgggtggatcacaaagttaggagtttgagaccagcctggacagcatagtaaaaccccgtctctactaaaaatacaaaaaattagcttagtatggtgtcatgcctttagtcccagctacttgggaggctgaggcaggagaattgcttgagcccaggaggcagaggttgcagtgagctgagatcatgttactgcactccagctgggtgatagagactgtctcaaaaaatatcaatcaatcgataaaatagaggacgtgcgcctctttctgagtctgatttggctttatgtaaggataagtttggccagtttttggagaatccagtaatttattgaagagtttgttaagttggccatgtcctgtgacctgacttggcatgactaatggatattattgtctacctgctctacagtagaggaaaaacagaggattctaggcactccccatgaaaccacaaatggaatggccacttgcaatcaaagccatgccatttattgggaggagggaatgcaaccccagattggcccctgatctggttttggctgtgtccctgcccaaatctcatattgaattgtagctcccataattcccccatgtcgtgggaggaacccagtgggagatacttgaatcatgggggaagtttcccccatactgttccggtagtgaataagtctcatgagatcagatggttttataaggagtttccgcttgtgcttggctctcattctctcttgcctgccaccatgtaagacgtgccttttgcattctgccatgattgtgaggcctccccagctatgtggaactgtaagtctattaaacctctttttcatccttttttttttttttttttttttgagacagtcttgctctgtcgcccaggctggagtgcagtggcacaatctcggctcactgcatcctccacctcctgggtttaagcagttctcctgcctcagcctcccaagtagctgagattacaggtgcctgacaccactcccggctaacttttaaatttttagtagagatggggtttcaccatgttgaccaggctggtctcaaactgctgaactctagtgatccgcctgccttggcctcccaaagtgctgggattacgggcatgagccactgtccctggccagtaacaaagttttagaagtacagagtgttagggccaggtgtggtggctcacgcctataatcctagcattttgggaggctgaagtgggtggatcacctcaggtcaggacttggagcattttgggaggctgaagtgggtggatcacctcaggtcaggacttggaagaagagctgaggcagggcttgcttgtctgacataatgtaaaagagtctggaacatgtcctgggtccagggtctcaaacccctcgtggcctatggaacaccaagctctgtgcctaagggtggaaggctgccctgccacactgcaatctaagcccaggacataaaacccctcgtggcttgtaaagaatccagggctctgggcataaaacccctcatagcctctggaatgtgtccagactcgctggccccttgctccttgctctcccaagatcataaactggttgtgtcttgagtgaaaagaacctgttctcctttatctcaactagcagagcatacgctaaaccgtcatagctacgcttggtgcaccactacctttctacccccatgtccgcacgtcctcaccacctgcttctttgtttgattaccaataaatagtgtgggctcccagagctcggggcctttgcagcctccatacaccagcgttggccccctggacccatcctatgtactcttaacttgttttgtctcattcctttgattccgccggacttcgtagcccccacgacctggtgttgggtctgatcaccccaacaagcctggtcaacatggtgaaagcccgtctctactaaaaatacaaaaattagctgggtgtggtggtgaatgcctgtagtcccatctacttgggaggatgaggtaggagaatcgctggaacctgggaggaagaggttgcagtgggcagagatggcgccactgcactccagcctgggtgacagagcaagacttcatctcaaaaaaactaaataggctgggcgcaatggctcacacctgtaatcccagcactttgagaggccaaggcaggtggatcacagggtcaggagattgagaccatcttgactaacaaggtgaaaacccgtctctactaaaaatacaaaaaaaaaaaaataaaaaataattagccgggcgtggtggagggcacctgtagtcccagctaatcgggaggctgaggcaggagaatggcatgaacccggga[132 bp omitted]taaccccattgtgtcactctctcttgagcctgcccacatgcctttttcttgtgtactttttgctttgcaataagtctccttactttcactatcttctgactcatccttgaattccttacttctcgtgatgatgtcaagagcctggcatttggggacctctcacagcccactggtatcaccttttttttttttttttgagacagagtgttgctctgtcgcccaggctggagtgcagtgggacggtctcagctcactgcaacctccacctcccagattcaagtgattctcttgcctcagcctccagagtagctgggattacaggtgcctgccaccatgaccatctaatttcttgtatttttagtaaacacggggtttcaacaggttgcccaggctggtctcaagctcctgacctcaggtgatccgcctgcctcagcctcccagagtgctgggattatgggggtgggccaccatgcccggccaacaatgatgtttcttttcctcgccgtcttagacattgctttaggaaacactctctattcgaattatttattagacctcgcctgctcccataggaaacttcccaactagacggctgtccctttaaaactgttttcctgcaatgttacccacctggcctggcctcagtactataataatacccatgccatctctcctacaggcaatggtatctactttgtaccacttattcaatgccatttatagggcaagtttttttttgttgttgttgttttttttttaacaaagtatcgctcttgttgcccaggctggagtgcaatgcgtgatctcggctcactgcaacctctgcctcccaggttcaagcgattctcctgcctcagcctcccaagtagctgggattacaggcacctgccaccatgcctggctaatttttttgtattttcagtagagatgggggt[148 bp omitted]catttttgccctgatggtaccatcaaatacatttcttcttgtctccctggagggtcttagtccctctgtagacaattatgcccttctctactcccatagctgcctctcataataatggtattattttaaattaccactttccagtcaaattctttttttctcttttttttttgagatggagtatcactctgttgcccaggctggagtgcagtggagagatcttggctcactgcaacctccacctcctgggtttaaataattctcctgcctcagcctcctgagtagctgggattacaggcacccgccaccacacccagctaatttttgtatatttagtagaaatgaggtttcgccatgttggccaggctggtctcaaactcctgacctcaagtgatctgcccacctcagcctcccaaagtgttgggattataggcgtgagccactgtccctggcctccccccaaattcttatcccattcatgcttaaaccaaagcgtcacttagataacagagatgctcaaccttcttaactcccctcccacatgggtttgtgctcccaatggatacctttggctatatggacgctgtagtagtccgttgtcacactgctataaagacatagctgagactgggtaatttataaagaaaagagttttaattgactcacaattctgcatggctgggaaggcctcaggaaacttacaatcatggaggaagggaaagcaggcacgtctcacgtggtggcaagagagacagaggggcaagcgcaggaacaactgcctcataaaaccatcagatctcatgagaactcactcactaccacgagaacagtgtggggaaaaccaccaccatgatccaatcacctcccgcctggatcctacctcgacgtgtgcggattacgggcattacaatttgagatgagatttgggtggggacacagagccaaaccatatcagatacccattcagtcagcctccaaataacttttctttcatttgaaatcataaaacccatggttaacagtgtattgataacatttgtttcaggggtcaatgtataacaggacaggcaaagccctctaatatacagttacatgacatcactcacccaagtgctaagcaggcagttggccttatcttggctgaagttggggctgccatcaacttgttggccccatggggaggatttgcccatcatgaggcaactcttcaaaactttacttcttcacttagccaggcacggtggttcacacctgtattcccagcactttgggaggccaaggcaggtggatcatgaaatcaggagatcgagaccgtcctgactaacatggtgaaaccccgtctctactaaaaatataaaaaattagccaggtgtggtggtgggcgtctgtagtcccagctactcgggaggctgaggcag[139 bp omitted]tacactgctgtctcatagactacaggacagtttagataaattgagactgtcccttgattctgtaacagatgtagtaatgggtaacagattagcattagtctatccatggtctaatggaacattagtaattagtatggtcagtggaacaactgtaattaataaaacctgctgtacctatataaacacctcagatcaaatggagaaaaatatcaacaagatatacaaacaactacctggctaccttcatcatactcagactggtacagaacagctggggtcccggctaaaccctatccttaagcctggaaccgccgccctaagtgaaaacagctgaccccatttttccatccaaatgttgcctttttggcctgccacacctctatcctgtgcccacaaaaagactgccgctggcagagcaacacaagcggctgatggctgagcatcaaagactacggatagacacggctaacttcagatggcgcagcttcagggaaagatcaccttcttcccacaccctcccctggcctccattccactgagagccacttccatcacccaataaaatcctccccatacactaccctacaatctgttcgtgtgacctaattcttcctggacaccagtcaagaacccggatgctgagagggcaggggcttggacgctcccgcacagagcctgctcccaccagagaggagtgactggccggctccagcgtttgttcccttcagttcctgcactcgcttgctcccacgctccctctcatgaggagtcaccagcagcaggctgagccaaaaaagccactccagttcccgcccatgaagaggatcaaggtcaaggtgatgtaggagttaagacgaaatcacttagactgatagggcaagggagtccttggtaaggctttcctttttaatgaaaagcagccccgaatcattttctaatgaagagcggcttgtaaagttgagctgcagagataggcatgcaagctgggagcttgcctgggtgaacgccggcctggcgggaacaaggaactagggactagacatgttcaatatggtggctccatcttcccttctctgccagccacgtgtacagttaacgagcagacaagagggctctggcc[139 bp omitted]atggtgaaaccccatctctactaaaaatacaaaaattagctgggcatgatggcgggtacctgtaatcccagctactcgggaggcggaggttgcggtgagccgagatcgtgccattgcaccccagcctgggcaacaagagcgaaactctgtctcaaaaaaaaaagaaaagaaaaaagaaaaaaagattaaggaggcctatataatgtttgagcagggaataaagtaggaatttggcaggactaacttccaagacaacatgtgacacgaccctgctgataacacaggagacagtaaaagaaactggccaaaaccagctggaaccaagacaggatgaaagcgacctctggctaccctcactgctcattatacactaattagaatgcatttgcatgccaaaaacacttccacccgcgccatgacagtttgcaaatgccacggccatgctgagaagttactcagtatcatctggatgggggagaaaattcgggttctgggagctccctgttccttacccagaaaactcatgtataatccaccccttatttagcatataatcaaaaaataactataaccataaaaatatatcaaaacagccaaccaatagcccttaggactactctacctgtggggtagccactctttgattcactccgtttttttttttttttttctggagacagggtctccctctgtcgcccaggctgctggagtagagacatattctcggctcattggaaactccacctcccaggttcaagcatttcttgtgccttagcctcctgagtagctgggactacaggcacacgctaccacacccggctaatttttgtatttgttttgttttttgttgttgttgttgttttgagacggagttccactcttgttgcccaggctggagtgcagtggcaccatcttggctcaccgcaacctccgcctaccgggttcaagagattctcctgcctcagcctcccaagtagctgggattacaggcatgcgccaccacgcccagctaattttgtatttttagtagagatggggattacaggcgtgagccacagcgcccggccaatttttgtattttttagtagaaatggggtttcaccatgttggccaggctggtcttgaactcctggcctcaagtgatccacctgccttggcctccaaagtgctgggattacaggggtgagacactgcacccagccccttttttcctttactttcttttttttttttgagacggagtttcacttttgttgcccaggctggagtgcaatggcgtgatctccgctcactgcaacttctgcctcccggtttcaagagagcctcctctctcagcctcccaagtagctgggattacaggcacatgccaccacgcctggctaatttttgtatttttagtagagatagggtttaatcattttggtcaggctggtctcgaactcctgacctcaggtgatccgcccgcctacacctcccaaagtgctgggattacaggcatgagccaccacgcctggctattcctttacttccttaataatcttgctttcactttactgaatccacttgctcttcaatgtattattttttttctagacagggtctcactctgttacccagactagactgcagtggtaccatcatggctcacgatagcctcaacctcccagactcaaacaaccctccggcctcagcctcccaagtagctgggactacaagtaggcaccaccatgtccacttggccaatttttaaaattatttttattttcatttatttatttttttgagacagagttgcccaggctggagtgcaatggcacgatcttggttcactgcaacctctgcctcctgggctcaagcgattctccagcctcagtctcccaagtagctgggattacaggtgcgtgcctccatgcccagctaatttttgtattgttagtagagacaagatttcactatgttggtcaggctggtctcgaactcctgacctcaagtgatccgccagccttggcctcccaaagtgttgagattacagggtaagctaccgcgcctgagctaaaattatttttagtatagacagagcctcactatgttgcacgggctggtcttcaactcatgttgctcttgaattctttcctctgtgaagccaagaacccacttggcctcccagactgaaccccaattttggggtgcgtcctgtgacagcaggaccaatataatgctgtttcctgtagttactgccaccacaataccacagggtcctctttttgccttttcagtttcctagttaccaatcctttaatacctaaatttatttatattcgatcatctctgttaaaataaccagtgtgatttctgtctcctgaatataccctgactgacacagatatttgtaataggaaggagctttccaaaggtaggttttggaaaattgtttattcatttatttatctattattattttttgagacagggtcttactctggcgcccaggctgaaggagagtggtgtgatcatagctcattgcagcctcgagctcctgggctcaagcaatcctcccacctcagcctcctgagtaggtgggaccacaggcatgcaccaccatgcccagctaatttttattttattttattttatttatttatttttgagacagagtctcactctgtcgcccatgctagagtgcagtggagccatctcggctcactacaagctctgcctcctgggttcacgccattctcctgtttcagcctcccgagtagctgggactacaggtgcctgccgccaagcccagctaattttttgt[169 bp omitted]gactttgaaacttgaggctggg[135 bp omitted]aaattagccgggcgtggtggcaggcgcctgtagtcccagctactccagaggctgaggcaggagaatggcgtgaacctgggaggcagagcttgcagtgggccgagattgcaccactgcactccagcctgggtgacagagcaagactccgtctcaaaaaaaaaaaaaaaaaaaaaatcacccaggcatggtggcatgtgcctgttgtcccaggacctcaggaggctgaggtgggaggattgcttgaacccagggggtcgagactgcgatgagctatgttcaagccacttcactccaacctggttgacagagcaagaccccatctcaaaaaagtcattccttcagtctccttcaaccatcactccagtgaaaatacttttgttgctcaatgctataatcagtttcccggttctcatcgtagctgaccaacagaagcatttggaattgattgctcccttctcatcggtacattttttcactgccttcaaggacatcgtcttattttattttattttatttttgagatggagtttcactcttgtcacccaggctggagtgcgattgtgcaatcttggcccactgtaatctctgctcccaggttcaagcaattatcctgcctca[134 bp omitted]cggcctcccacagtgctgggattacaggcgtgagccaccgtgcccggccacatcatcttattttgattctcctcctactcactggttattccttttcgttttccaccgtgagttccatcacttatttgattttaggcttctgaattttggagtgctctgaaacctaggttgttctctcactcgctgtcgctctaagatgagctcaggactttaaactctcagctccagaaggagttattccaaagagctcgcaaacctgtgggtatgtgtagcaatggattctaagggtt[131 bp omitted]atctccacctcctcggttcaagtgattctcctgcctcagcctcccgagtagctgggattacaggcgcccgccaccacgcccagctaattttttgcatttttagtagggatggggtttca[132 bp omitted]tgagacagagtcttactctgtcacccaggctggagtgcagtggtgtgatcttggctcactgcaacttctgcctcccaggttcaagcgattctcctgcctcagcctccagagtagctgggttacaggtgtgcaccaccactcccagctaatttttgtttttttagtagagacggtgtttctccatgttgtccaggctagtcttgaactcctagcctcaagtgatctgcccacctcggcctcccaaagtactgggactataggcatgcaccaccacgcctagctaatttttgcatttttagtagagacggggttttgccatgttggtcaggctggtctccagctcttgacctcaggtgatccacctgcctcagcctcccaaagtgctgggattgcaggtgtgaaccaccacgcccaacctagtttcttagaaataaacatttaatagggacttaagaacagaagctggaccagggacaatggctcatgcctataatcctagcactttgggaggctaaggccagtggatcacttgagcctaggagtttgaaaacagcctgggcaacatggtgagaccttgtctctacaaaagataaaaaaattagccaggcatggtggcatgcacctgtggtcccaactactcgggaggctgaggtggacgaatcagttgagcccaggaggttgaggctgcagtgagtcatctttgtgccactacactccagcctgggc[221 bp omitted]gaggcagaagaatcgcttgagcctgggaggtggaggttgcagtgagacaagatcgtgccattgcactccagcctgggcgacagaatgagactctataaaaaaaaaaaaaaaaaaaaaagacagcagatccctgcactgttacccccccagacctaaagcttatagaccataaagaaaaggtgattggccgggagcggtggctcacacctgtcaggctggagtgcagtggcgcgcgcgatctcagctcattgcaagttccacctcctgggttcatgccgttctcctgcctcagtctcccgagtagctgggattacaggcgcctgtcaccatacctggctaatgttttgtatttttagtagggacggggtttcactgtgttagccaagatggtctcgatctcctgaactcgtgatccacccgccttggcctcccaaagtgctgggattacaggtgtgagccaccatgcccagcctaaactggaaatcttagggcccttcccagagctggggtgagtcagatgccaacatggcagatgagcatccaagatgaagttgcttttccctctaccagtggtctcagaaaacagatgctagactgagcgcggtggctcacacctgtaatcccagcactttgggaggccaactgcacctgaggtcaggagtttgagaccagcttggccaacatggcgaaacgctgtctctattaaaaatacagaaatcagctaggcatggtggcgggcgcctgtagtcccagctactcgggaggctgaggcaggagaattgctcagacctgggaagcagaggttgcagtgagctgagatcgcgccactgcactccagcctgggtgacagagtaaaactccgtctaaaaaaaaaaaaaaaaagatgctgaagacgggattctgggattaggttattcacctctttgctctttgatgagctgtttaatgatgtgatgatatcctgggaggtggaaaacgggatgacagttattgcatgtagtgccatcattcattatttattatctttggttgtttgcaatgaggttccagtaaacaaatcaaaagccttggctgggtgcggtggctcacgcctgtaatccaagcactttgggaggccaaggtgggcggatcacctgaggttgggagttcgaggccagcctgaccaacatggagaaaccctgtctctactaaaaatacgaaattagccaggcgtggtggcacatgcctgtaatcccagctactcaggaggctgaggcaggagaagcacttgaaccagggaggcagggttgtggtgagccaagatggcgccattgcactccagcctgggcaacaagagagaaattccgtctcaaaaaaacaaaccaacaaacaaacaaaaacaaaaggctttagccaggcatagagggcacacctgtagtcccagccattgggagtctgaagctaggggattacttgagccctggagttcaaggctgcagggagctgtggcattgccctccagcctgtgtgacagaatgaaattctgtctctaaaaaaaaaaccttctgttgttgttgttgttgtttgtttgtttttgagagggggtctcgatctgttgccagcctagagtgcaatggcgtaatctaggctcactgcaacctccgccttccgggttcaaacgattcccctgccgcagcctctctagtagctgggactataggcacgtgccaccacgcctggctaattttttgtatttcagtagagatggggtttca[138 bp omitted]ctgctgaccttgaccaatatagtgggagcgatgagggctgtggaacagaacagctatttctgtcacactgggaagatgacataaagaaaatgatgagctcaggactttaatctcagctccagaaggagatggagatgctgtgtatttccaaagagctcgaaaacctgggtgtatgtgtagcaacagattctaacagtgttggaccagggaggatggaatgtcaagtttgatgggaatgaattaatgtattaattctgaatttaatgtgctagcttgagcagctgtaagtagctctaataataatggaccaaaacttgggttcagtgatggcctacatttaagtaggttaatatcccagaacctccctggtagaatgtcaagaagagaagataaagtggccgggggggtggctcaggcctgtaatcccaccactttgggaggctgaggcaggcggatcagctgagctcaggagtttgagaccagcctggccaacatggcgaaaccctgtctctactaaaaatataaaaattagccgggcatggtggtgcgcatctgtaatcctagctactcaggaggctgaggcaggagaatctcctgaacctggaaggtggaggttgcaggttgcagtgagctgagatcatgccactgcactccagcctgggtgacagagtgagactgtctcaaaaataataaataaataaataaataataaataaaataatctaaaggatttgggaggtagcaactctggaatagacttgttatgtgcaatcatttgtctctcctcctgtatatacccccgggagtacacaggaacattcttttcattgagaaatgaactagggaggagtataaataagtggatggatggatggatggatggatcaatcaatagatccatagagtgctctccattcaacaattgaagcacacacatttttttctcaagcacacttataaaaattgatctgtactaaaccaaaagaaagccccgataaattcaatgaacaggtatcatacagatcaatgtttctgatcactatgcaattagatctctagttaatgtcaaaaagaggaatttaaaatcctcatatatgtggaaatttaaattgttttaatttttgcttttgagacggggtcttgctctgtcacccaggctggagtgcaggggcgcgatcacagctcactgcagccttgaccacccagactcaagccatcctcacacctcagcctccctagtatctgggactataggcacgtgctaccacggtaagctaattttttttttattatttttagcagagacaggggtcactatgatgcacaggctggtcttgaactcccgggctcaagcaatcctcccgcctcggcctcccaaagtgctgggataaggtgtgagccaccacacccggctttccctgcattccaggggacttgtttacagtcttttaactttgaattcttttgttgttttaagtgtgtttctttctgtctttctttgtttttttttgttttgttttgtgtttgagacagagtcccactgtgtcacccaggttggagtgcaacggcgcaacctcggctcacggcaacctctgcctcatgggttcaagcaattctcctgcctcagcctcccaagtagctgagattacaggcatgcgccaccactcccagctaatttttgtatttttagtagagactgggttttaccatgttggccaggttggtcttgaacttctgacatcaggtgaaccgcctgcctcagcctcccaaattgctgggattacaggcatgagccaccgcccccggccagtgtgtttgttataaaacagcattgatctggatttagtgtgtatatgttttaatccatgttgtcaaactttgtcttttaactggtgaagtcttgttaatttacatttaatgattaatataattgacattgtttatcatcttcatgtattatattacttcagtttatctctccctcctcaaaccccaaaatgtgaatataatctagactttaaattcttaactattgaggatatat[356 bp omitted]aacagaaaactttatcaaattattctaaccactttacttcatatgtttcttgcaatatcttctggatttgcatttttttctctttattattttattttattttttgagacagagcctcattcactctgttgcccaggctggagtgcagtggcgtgatcttggctaacggcaacctccacctcccaggttcaagcgattttcctacctcagcctccctagtagctgggattacaggcatactccaacatgcccaggtaagttttgtatttttagtggagacagggtttcaccatgttggctaggctggtctcaaactcctaacctccagtgatctgcctgccttggcctcccaaagtgtcgggattacaggcatgagccactgtgcccggcctattgcctcattttcacctgaagaaattggctattctgccagacacagagggtatttccaggtatattctgtctgttagagagggtatttttactttgaggaactgccaattccctattctgtcttttatggagggaaatatcataactctgtgctttccctctgagctcagaggtgtactggcgggggaggggtattaaatctatgggtgaaaagccctgggtataaaaaaaaacattgtccggctgggcacagtggctcatgcctgtaatccagcactttgggaggccaaggcaggaggatcccttgagtctaggagttccaaacaagcctgggcaacatagtgagacactgtctcaatttttcaatgttttttttttgttgtttgtgttttttgttttttttttttgagacggagtctcactgtcacccagtctggagtacaatggcgcgatctcagctcactgcaacctctgcctcccgggttcaagcgattcttgtgcctcagcctcccgagtagctgggactacaggtgtgtgcctggctaatttttgtatttttaatagagacagggtttcaccatgttggccaggctggcctcaaactgctggtctcaagtgatccactcgcctcagcctcccaaagtgctgggattatgggtgtgagccaccgcctctggtcctggctgacatcttgactctaacttcatgaggatctcagccaggacctaaccccaggagtgaggttaactgattgtatttctgaccttcagaagttgagatacatttgttatcttaagcaactaacttatggggtatttttacacaacaatagacaactaatatagttatctagtaataatcagcctaaaaaatgttgacttgacagacctatactataccacagaaccttgtttctaccaccattgccatctcaaagaactgtaccaccaccagcacctctgtggggaccacgacatcctgtttgctgaaaattaaataaatcacagtgggctgggtgtggtggttcacacctgtaatcctagcactttgggaggccaaggcagacagattgcctgagctcaggagtttgagaccagcctgggcaacatggggaaaccttgtttctactgaaaatacaaaaacttagccaggcatgatggtgtgcgaatgtaatcccagctactcgggaggctgagacaggagaattgcttgaacccaggatgtggaggttgcagtgagccgagatcacacgcacttcagcctggacgacagagtgagaatctgtctcaaaaagaataataaagttaattaattaattaaaataaataaatcacattgggcatagagggagtgcatggtgtgtgtgcaattcactaggactctggtcccaaaaagcagacagaattcatgctagcatgagaggccatttattgttcaggggctgagcccccctgttttgggggggttcctgcactgctgcctccccccattgttcccgtggacccctcaagtggcaggttgctgagatgatcgtggagggagcacatcttcaagtgtagatggtccagagtggccatcttctccctgtcatgaggcagcggggagttgatggcggcatggctaggtgctggggtgttggagtggaaggggagatcaggccctttccccaagatctcaccctcctcccatgccctcagcctccttcctcactctggcttcatcttgtctgtcagcagtaggttcttggcccgcagggcctcgtcttgggccagccgaagggtggagctcagggcctctgccctgacgtgtttggctaaggcctggcgctccagctcctggggagaggagcgtaggcgtagctgggcttgctggactgggctgggggtggagggggaactggattgcggagggcaaagggtagggtcccatggggcccacatttctccctcagagtttcccatcatgccttgagcttgagactgaccccagcatcccacaatgcactggtctccagattccgctgtggactaaatctgtgtctgtcctattgtctgtcccatgatgcactgacctatgtcccagcaagcactaaatcagtgcctatcgtctgtctcctaagctcatgaactatcctacatttgatatgtgtgtgcaccccagtattctaccacatggtgacctcctacattccataatttggaagaccccacatct[135 bp omitted]acagggtgaaaccccatctctactaaaactacaaatattagctgggcgtggtggtgtatgcctgtaatcctggctgctcaggaggctgagacacgagaatcgtttgaacctgggaggtggaggttgcaacgagccaagatggcgccactgcactccagcctggagcaacagagcgagactctgtctccaaaaaaaaaaaggccgggcgcagtggctcacgcctgtaatcccagtactttgggaggctgaggcaggcggatcacgagatcaggagatcgagatcatcctgactaacacggtgaaaccctgtctccactgaaaacacaaaaaattagccaggtatggtggcaggcgcctgtagtcccagctacttgggaggctgagg[139 bp omitted]gttctctacgtacaactgcaccaagccccatttcctctcatgtattagtcctatagctcggccacatcaatgtcccacagtgcctcacttgtctgtctcacccactacaacataatcctatagtacattaggtcaatatcccataatacagtgcactagggctcaagttccaccaactattgggctgagtgtgttgtgcaatgccccaggaagagctgtggttccatttcccataacgcatcagctaactggggcctacagtcactgggtctcctattttacctcaatatagctgaccccaatgatcttgtacaatgcaccgcctctctaaaagtttagagaaaatcaggcctatgttccatgaagctttagactggtgtctgtctcgtgtcccacaatgcactagatccaacgtcctatcatgctttaggcccaagtccatcttccgaggtagcgtaatgattggcctgtgactcactcaccaccaaactgcttgtccatctccccatgcattagggccaagtcctcccccagtgcctgctgctcccagctcagcccttccccttctgccacacaccagcagtacccttgagtccggggttcccctccccttgccccaacagaaaagtaaagtgggacatggtggcccatattccctggtaccagaatcttcttgtgtagcctctgacagctgggacaggcaggagtcaggcccctctgcttcacctcgtccactagtgaggtcagtgctcggtccagcagctgctgcagggactccgtagacaactgcgacccctggctgggggaggggcggtcaccagataaagaggcccagtaccaactccaggacgccccatgccccatgctcacctgtggagcctccatttggcctcgtttccagtatgcaccctatgcaaccttcccagcatgcactgtgcaccagctgtcccttggtttccatggtgctctggggatcactactccttttttttttgagacggagtctggctctgttacccaggctggagtgcagtggcgcaatcttggctcactgcaaccttcacctaccgggttcaaacaattctcctgcgtc[211 bp omitted]tctcgctctgtcacccaggctggagtgcagtggcaccatcttggctcactgcaacctctgcctcctgagttcagcgattctcctgcctcagcctcctgagtagcaggtattacaggcacccgccagcacgcctagctaatttttgtgtttttagtagatatggggtttcaccatgttggccaggccggtcttaaactcctgacctccggtgatcctcccacttggcctcccaaagtgctgggattacaggcgtaagccaccacgcccagccagagtcactattcctaagggcaccagacagccctcagtttgcaaaggccgtcaagaactaacatttcccataatacactagtgaaactcgatttcatgttgtactgtgagtccccctttcctacaatggaccttcccacaatgggccaaaaatggtgtatccctcggctctcacaatacaccaaggtctcacttccccctcagtgcactgaaaccctgcctctcctcatgttcacatcccagccttcccacaatgcactggaaatatgatgcttaaaatgtactaagtgtttttttttttttgagatggagtcttgctgtcgcccaggctggagtgaaatggcacgatcttggctcactgcaccctccacttcccaggttcaagagattctttggcctcagcctcccaagtagctgggattacaggtgctcaccaccacacccagctaatttttgtatttttagtagagatggggtctcaccatgttggccaggctggtctcaaactcccgacctcagtgatctgcccgtcttggcctcccaaagtgctgggataacaggtgtgagccactgcgtccaccctttttattttatttttattttattgagacacagtttcactctacctactaggctggagtgcagtagcgtgatctcggctcactgcaacctccgcctcccgggtccaagtgaatttcttttttttttttttttttttttgagatggagtctcactctgtctcccaggctggagtgcagtggcatgatctcagctcactgcaagctccacctcccggatttacgccattctcctgcctcagccttcctagtagctgggactacaggcacccgccaccacgcccagctaatttttttttgtatttttagtagagacggtgtttcaccatgttagccaggatgctcttgatctcctgaccttgtgatctgcctgccttggcctcccaaagtgctgggattacaggcatgagccaccgcgcccagcctggtccaagtgaatttcatgccccaacttcctgagtagctgggattacaggcacgcgccaccacgcccagctaatttttgtatttttagtagatacggggtttcaccacgttggccaggctagtctcgaactcctgacaccaagtgatccgcccaccttggtctcccgaagtgctgggattacaggcgagagccaccgcgcccggcctgtaccaagtttctcttgagttccacaagacactgattctaccttgtagagtgggaacaaatgaggcttctagtgcagcaggaccggctgtttctacaatgcactgggataccttgtctcccaaaatgaacagcgccccacccttcactaatgtcccatctccttccgcatctcctttaatgtcctatccacaaggctcccagaggcaagcccagccccgttacctggcacagcgggcacagttgccttggtgggaccgatccaggttcatggagaggtcaggccctcttcgagagttctgaaattgccgcccgaactcctccagaatgggtttcagtgggcccagcccctccagttcgctcctcagtgaagccacagacactgctgaccgctccaccctgaggcatgagtaaccagtgctgctgggtcgtctcttcagcggtataaccctggcaagactccacccattattagcccaccacttgcgtctccatctggtcagcaattctccaccctgccctcccctctctgctctgactggcctcactttttgtattttactttatgttatgttatttatctgttgactattttgagccagggtctggctctgtggcccaggctggagtgcagcagcaccatcatagctctctgaagctttgaactcctgggctcaagcgatcactcctgcctcagcctcccgagtggctaggactaccagggtgcgacaccacaccactcccagctaatttttaaattgtttgtagagatggggtctccgctatgtggcccaggcttgtcttgcactcctggcctcaagtaatccgcccacgtcggcctcccaatgtgctgggattatagatgtgagccacctcactgggccaccttttgtagattactgtttggaatgcccctcctagttctcttaattgattttctcggatcccacttgaccccaccctttgcccttttaaggtatagaccacaccccttctctaattgattccacccctcaggccttattagggctgatgcaacccttcctgctctctaattggtgtttcccgatgtcggtatatgttccggaatgcctggccatagctgattggcctacccatttccctcaagaccccgccctcaggttgggattgccctgccccttccggtcttcccatgcactggccccaatcctcacatggtgcacagctcatccgcccgacctcgcagctcctgcaagtcccgcgccgtctgtgcctgttcgcgctgtgcccgctcccactggcctaggaagccgtcgaccctgccgcccaggcccccgagcagccgcagggcttcctgcaccgccccctcctcctgatgccaccgggcggtcagtgaggacacctctctcctggaggggcagaggaggggaatgggtaggggctaggcttcaacaggtccccacctacccccacgagataggtgggacaggactcacctatctcgccccactgagaccatgcccgtggctccagacccacccaggtcaccaaattttattgcaccctccatttggtgaaatttggtcgtgtcctccagagccccgcctttatccccttcctttattggctatcttggccctttcctggtcaggtccccaacctctacctgggctcctccagacactggccccccaaggcactgcccaccctactctgccccacgtggtgcctccaggaccactcctctcctaagccccgcccacctcagtttcaccaggcctggacctgcctcccagcagcccagaactaaaaagttccttattctgtccctcccttgctcaggtcactgccttcggggcactccctcctctgctcttggagaccccagccttgtcgccttccggttaagatctaggccgggcgcggtggctcacgcctgtaatcctagcactttgggaggcc[135 bp omitted]aagcaggagaatggcgtgaacccgggaggcggagcttgcagtgagccaagacggcgccactgcactccagcctgggcgacaagcgagactccgcctcaaaaaaaacaaaacaaaacaaaaaacgatctttgaggaacctcccctgtgtccccgcccaccgcagctcctggagactcctcccgtgtctctacccaccttcgttcctcgaggctcctcccatgttcccgcccacctcaggtccccgaggctccacccatgtcaccgcccacctcagctacttgagaacccccgtcccttgggtcccgcccaccgcatctcctcgaggctccacccctgagtccccgccgatctcgttttcgaggctccgcccctaggtcccgcccacctcagctcttcgatgccggtgaacagcttctgcaattcctgctcgctcacgtaggggccctcgccagcccgaggccccattccccagcctgcggggaccaggccgtgtggccgcgagggtttgtcgggactccctggcgggccggggcagccctgggacgtggcggcggggcccaggctgttccaggagaggccagcctccggcttctgcttctcctccggctcctgcttctcctccggctcctgcttctcctccggctcctgcagctcggcctcctgccgtcgcggcgtctcatcctgcagctgctgctggaggtagcgcagcttctcctgggtggtaagggaggacggggtcacagcgtccagccgctttcctcccgcaaccacctccaccccaaaatccgctccagtactccccgagattggaagtagaacgcctgtggggacagtatgttggaagtctcactggctgtcattagggaggggaggcaccatttgaggcccagttggactccaattcccgctaacctcccacagcctgcctccaggtatccacccggccctccaagccctccaggcgtcaaataccagtcccggccacttggcaagaacaactgaagctttctcagcattttgttggaaaatgagtgggcatgtggacaggacgggccttctcacctgaagtccagctcgattctctttctgggacctgaatgtgactgcagggcaagagtcccccatctgggtgttggagcctcatttgaatccctcttatcagcgagttctaaggatgactatgtgcacgaaggtgcagtgtggtggtggtgtcggggcagggagttccacctaaaagtgtatcttgagtccctcgtgcatctgacctcctcccacaaatcctgggactgccccctagcccttacctccagcagggcagaattctgcttcaagacgttggttttgatttcagcatcttccacagaccgggtcaccttccagcagttctcctgggtcagacaccagggcgagggccctgccttcccattccagttctgcctcccaacccttagcctgtctgtttccatccaggctccaggcctcctagccccccagtacaagacacactcaccagctcatttccttggctaaggggatggcttcctccttagccagatgtgccagagtggcacccctccacttcctcccacctctcttcggtccacccattccatttctcctctttcttttctttttttcttttgagactgagtctcgctctgtcggccaggctggagtgcagtggcgcaatcttggctcactgcaacttccacctcgtggattcaagcaattcttctgcctcagcctcccaagtagctgagattacaggcgcccgccaccacacctggctaatttttgtatttttagtagagatggggtttc[131 bp omitted]tactcccattcccctctccccatccattcctgcgtcccactggctcaccttgagttgaatgcagtacccctccaactcttctgcctcttgccgccttctctccagattctcgctcagcacagaacactcgctctggagcatggaaggaggagaggttagccaaggacacgaggggacagcctgtggaaaagaagatctgggcctgggaaggttccttttctttctgagcctcaagctccccaactgagctatgggtgcattctgctggaggcaggctccaagaagggaacttggccctggaggaagggcaggtgttggatatagggggtcctcacacctgcagagactgcacgtgctggttaacccggttggtcttttccttcaagctggtgatggagtctttggcgcggaccaatccactgttgaccccactctggggaagaatgggagacaggtgagttagtgggtatgtgggggcaagccccaagcccaggaagaattccagaactgggaggctgtgtttacaccttgattttgccctggaatggctatgtgacttggagccaagggctatacctctgattcttagcattcctgcgcggcaaacccagggcataaacgacctttcttcatggtgggctgggagaaaaataggatccaggagggaaagggggatggaggtggggtgctcagacatgtggaggaagaaggatggactcaaccaaacactgagctaaatgtccttgggggccaggtgccgtggctcactctggtaatcccagcactttgggaggccgaggtgggtggatcacttgaggtcaggagttcaagaccaacttggccaacatggtgaaaccccaactctactaaaaatacaaaaattagctaggcgtggtggtgcctttaatcccagctacttgggaggctgaggcaggagaattgcttgaacctgggaagcaggggctgcagtgagctgagattgcaccaccgtactccaatctgggcgacagagcgagtctccgtctaaagaaaaaaaaaagtccttggggtccacagcttaaaaagagaaactttgaaaacacatgccctttctctccaggaactggtgaattacaaaggaagccacttttcagatatgaacacttgctatgcaccaagcacttgtcttgtcttttattcttcacaactccgcctcttgaggttatttggcctattttacaagtgagacaaatgggtctcagaaatgggatatcccttgtcttcccaagcactcagcacattaggtgatctcatcagaatctagattcagaacgcttgttttaaaccatgacaccatgtggcctctggtcatcattactttatatcacataaagtgttgtgcgactcctgccaatccgtggttcaggagggatgcatgtggtaggatccattctcccagcttggacagttacagaagccttagcctggcacatgactgcccaaccagagactacatttcccaggtttccttgcagctaggtgtggccatgtgactaagttctggccaatggaatgtgagtggaaataatgtagtcaatttatttttgggggaggtgtgtgtgtgtggggggtctctcattattaccctggctggtgtggagcggtactatcatagctcaccagctcctgggctgaaatgatcctcttgcctcagcctcccaagttgctaagagtataggtgcttgctaccatgcccagcaaaattttaagatgtttggtatagatgggttctcactacgttacccaagctggcctcaaactcctgggctcaagtgatccttttgtgtctgcctgtaagtgttggtcttacaagcatgagccactgtgcccagcctccttttttctctctcttttatttatttttttttttagcctacatcattacttagactgtgcagaattatagtcaatttctgagtcatcccttataggaaaagagtgagaactttccctttttctctcatttcactggaatgcacaattgagggctgtcttggaccagcagatagaggacacaatgaaacagaagaagcctgaatccttgacatggagccaccatactccattccaaccacctgtgaagactttcagggtgagacattacatcttctgtgttattcaagctgtgttattttgtgtttttttgttacagtagtcaaatgtataacttcaatatcattgacattctttttttttttttttttgacagagtcttgctcttttgtcaggctggagtgcagtggcatgatctcggctcactgcaacctctcactcccaggttcaagccattctcctgcttcagcctcccgaatagctgggactacgggcgtgcaccaccacaccaggctaattttttgtattttagtagagacagggttt[134 bp omitted]aaaagagacccagagagccctctgccagctgtttatgaccagttccagccgatggaagggaagtgggcactggtcgatgtgtggaaaagacaggcatgatctcttcccctgttccccctgcttaatggctggaaggcagtggcgagagcaactgtctagaaatggctgagcaaccagaacgtagacacctgtaacctgctgcatttgaagagcagagctactaagcttatcaagcattttatgtgcaaaaaagcagttctcttggtttctctcatggttgctgaactaatacacaaaagatagacagaataagtttcctcccttgtgagatggaggcagcaacacatttcttgcatgattgctctggggaagaagtggaataagaaatattgtatccagttaac[131 bp omitted]tggagccccgtctctactaaaaatacaaaaattagccaggcgtggtggcaggcagttgtaatcccagctacttgggaggctgacacaggagaatcgcttgaatccaggaggcggaggttgcagagagcctagatggcgccattgcactccagcctgggcgacaacgagattccatctcaaaaaaaaaaaaaaaaaaaaaaaggaattcaaaaattccacccctccataaaaacaatgaaaaaactaacaaaaaccataagaagcagtttgttcacaattctggaaattaaccaaaggcttgcagcaactcaaagagcatttattcaagaaaagtgactctcgataaaaaacggcaagacttgaggaattttaacttatcctagtcctatctcccactccctagctcagcaggaaccctggaaaataacagcccacatttcccacagggaggaagcagaatgaagctagaactcattcaaagcctcataacccaaagaagagtcattctatgattgttaagtgatgcctgggaagaccccacacagaatatttgtctttccttttcagaactggcaaagccgtgaaagcatctctgatagttgaaggaaagatttggatgtttgtcctctccaaatctcatgttaaaatgtcatcccttgccaggcacagtggctcacacctgtaatcccagcactttgggaggctgaggcaggaggttcacttgagctcaggagtttgagagcagcctggacaacatggtgagaccccaactctacaaaaaaaaaaaaaaaaaaaaaaaaagtagccaggtgtggtggtgtgcacctgtagtcccagctcctcaggaggctgaggttgaagaatcgcttgaacctgggaggtggatgttgcagtgagccgagattgcgccactgcactccagtctggatgacactgagatcctgtctcaaaaacaacaacaaaaaaatgtaactcccaggctgagcgtggtggttcacacctgtaatcccagcactctgggaggccaaggtgggcagatcacctgaggtcaggaattcaagactagcctggccaacatggcgaaagcccgactctactgaaaatacaaaaattcgccaggaatagtgatgcatgcctgtagtcccagctacttgggaggctgaggcaggagaatcgcttgaacccgggaggtggaggtcgcagtgaaccgagatcatgccactgctctccagcctgggcaacagagcaaaactccatctcaaaaaaaaaaaaaaaaaaaacttgtgtggcatctccttgctcctgctcttgccaggtgatatgctggctccatcaccttttgctatgaggccctcaccaaaagctgagcagatgttggcaccatgtttatcagatagcctgtgaaccataagccagttaaacctcttttatttatacccagccttgagtattcctttatagcaatgcaagaatggactaacatggagtgggagagggaacatttgtaaagaaaaaaaaattttacgcttgttttaatgttgctactgccgaaggcaatggataacagttggggtaaacaataaaaagcaaaaaatcttaaaaggaaaatctgatggacatatctgtagaagccttgaaatgttccaacaaattcctgggaatgtagaaagccattggcctgtgtagggttgtgtacatgcttgggaaagttctgagaaggccccaagcttttcacctctggctgaccttgaaaccttgaaacgctgcacaagcaggaagggaaggctaaggtagagttgtaaattgtctgagtgttaaaggtgtgcctcatcaggcacacagagtgccatttggcaaagactagaagattttgttgttgttccagtttaaggaaatgtctctccaatcattagctaaccactaaaattagagaacagagacttcagtggccaaacatgacaaagaacacagatattacagaaatagttcagaaaagtctgttttttaaaaagcaactacaggccaggtgcagtagctcacacctgtaattccaacaatttgggaggatgaggtgggaggactgcttgagcccagaagttcaagaccagcctgagcaacatagtaaaa[175 bp omitted]gtggcgggcgcctgtagtcccagctactcgggaagctgaggcaggagaatggtgtgaacccgggaggcggagcttgcagtgagccgagatcgcgccattgcactccagcctgggcaacaaagcaagactccatctcaataataataataataataataataataataataaaataaaattagctgagcttggtagtgcacacctgtagtcccagctactcagaaggctgaggcaggaggatcccttaagcctgggagttagaggctgcagtgggccacaatcatgccactgtacagtggcctgggcaacagagcaagatcatgtctcaaataataataaaaataaataaataaaaataataaaataaaaagcaactataacaagcaataataacaacaaatccttatgagtggggagaatctgtttctagggttgctacattatgatactttattttttattgtattttttttttttgagacagagtctccctctgtcccccaggctggagtgcagtggcatgatctcggctcactgcaacctctgcctcctgggttcaagcgattcccctgcctcagcctccccagtagctgggactacaggcacccgccaccacgcctggctaatttttgtatttttagtagagatgggggtttcaccatattggtcaggctggtctcgaactcctgacctcaggtgatctgcctgacttggcctcccaaagtgctgagattacaggcgtgagccaccgttccctgctacattatgatactttaaatggccagttttcaggccaggcacggtggctcacacctgtaatctcagcactttgggaggccaaggcaggtggatcacctgaggtcaggagtttgagaccagcccagccaacatggttaaaccccgtctctgctaaaaatccaaaaattagacaggcatggtggtgcacacctgtaatcccagctactggggaggctgagtcaggaaaatcgcttgaacctgggagtcagaggttgcagtgagccaagatcatgccgctgcactcaagcccgggtgatagagtgagactccatctcaaaaaaaataaaaaataaaaaatggccagttttcaacaaaaaagttataaggcatgcaaagaaaaaaaactatggcctatacaatggaggacaaacaagcagtcaagagaaactgttcaggggtaggatggcgggggcagatttggacttactaggcaaacactttaaatcagctactttaaatatgttcgaagtgctaaaggaaaccattcctaaataactaaaggaaattgagagaataatgtctcaccaaatagggcatatcactaaagagacaaacattattaaaagaaaccaaatagaaattatagggttgaagggccaggcgcaatggctcacacctgtaatcccagcactttgggaggcc[133 bp omitted]aggcagcagaatcgcttgaacccaggaggcagaggttgcaatgagctgagatcacactactgcactccagcctggcaacagagagagactccgtctcaaaaaagaaattctagggttgaaaagtacaataaccaaagtgaaaaatgtactagagggggctctgtagcagaataatgattcagtgaacttgaacatagctcaactttgattatccagcctgagaaacatgaaaacaaaaagaatgaagaagaatgaatacagcctcagagacctatggatctgggagtcccagaaggaaagaaaggggcagaaagaatatttgaagaaataatggttgaaaacttccaaaacttgatgatttgaacataaatccacacatccaagaagccaaatgaactccaaataggctccaggggccgggccaagtgactcactgctgtcatcccaggactttgggaggctgaggagggtgtattacttgagaccaagagctcaagaccagcctggccaacatagcaaaaccctgtctcataaaaaacaacaataagaaggctggacatggtggctcacacctgtatttccagcactttgggaggccaagatgggaggatcgcttgagcccaggagtttgagaccagcctgggcaacaaagtaacacctgcgtctctaaaaataaaaatgaaaataaaaacacttttaaaataggataaaatgggccaggtggctgggcttggtggctgatgcctgtaatcccagcactttgggaggccaaagtgggtggattatgaggttaggagtttgaaaccagcctggccaagatggtgaaaccctgtctctactaaaaatgcaaaaattagcctggcgcggtggtaggcacctgtagtcccagctacttgggaggctgaggcaggagaatcgcttgaacctgggaggcggaggttgcagtgagccgagatcgtgccattgcattctagtgtgggcgacagagcgagactccatctcaaaaaaaaagaaaagaaagaaagaaaaccacagaccaatatcctttatgaatatggtcacaaaaatcatcaacgaaatactagcaaaccaaatccaacagcatgtaaaaaggattatacatggtgaccaactgggaattatcccaggaatgcaaggttggttcaacatactaaaatcaaccaatgactgggcatggtggctcatcccagcaatttgagaagctgagacaggaggatcacctgaggccagaaattctagaccagccaggtcaacatagtgagactccatctctaccaaaaaatttaaaaattatctgggtacagtggcatgtgcttgtggtctcagctccttgggatgctgaggtgggaggactgtttgagcccaggaggttgaggctgcagtgagctatgatggcaccattgcactccaacctgggcaatggagcaagactctgtctctaaaaacaaataaatgttacataccatattaatagaataaaagggaaaaaaaacacatgatcatgtcagttgagaaaaagcttttgacaaaataccactcatgattaaaaaaaaaaaaacactccacaaactagaaatagaaaggaagaaaggaacttcctcatcccaataaagggcagctacaaaaatcccacaaaatgtgatagtttaaaatatgtccataaattctttcacattcctttaaaacgtggagccttatttgcctcacttgagtatgagctggacttggtgactcacacccaggaaatagaataaggcaggctagttgtggtggctcatgcttgtaatcccagcactttgggaggccgaggcaggtggatcacctgaggtcaggagttcaggaccagcctggccaacatggtgaaaccctgtttctacaaaaaatacaaaaattagctgggcatggtggtgcacacctgtaatgccagctactcaggaggctaaggcaagacaattgcttgaacctgagaggcacaggctgcagtaagccgagattgcgccactgcactccagcctaggtgacagagactctgtctcaaaaaataaaaaaatagaataaagtagaattgatgatatgtgaggtaagagactacttcataagaggaactgtttcttatttgctctctcttcatctagggaacgatagcctcaatgtcataagcagccacctatgaagaggcccatgtagcaaggaattgaggcctccagccaagggcaggtgagtgccccattttggtagcacaacctctggccccagtccaaccttcaggtgactgcagccccagccaaaatcttgtttgcaacctcgtgagacgccctgagccaggcccacccagctgagcccctccaagtttgttgtttgaagttttggtgtaattggtttcacagcaatagaaagcattacacaaagtgtctttctaacctgaagactcagaaggtcttgggtttcctgtgggtaattgttctggaaaccaaggcaacaggacctagggccaactaatttctcccagttactagccgtatgacctcatggagaggacttcacctctctgtgcctctgcttccctacctgtgaaatggagatataactaacaactaccttcacagggttcccattgtccttcctcctacctggaaactgacactctctcaaccagggtctccatcaccgcctggttctctgtccccctctttccagttctctgtccccacccagcccctgtgtctgttccttctctctctgggtctctatccccctcctctatttctggtcttctgtctcaccctgattcagctctgtcccccaaatctcagagtctctgacttatttttcctgagtctctgcctttctactctttaggtctctgtcttctttttttttttttttttttgagatagagtctcactctgtcaccaggctggagtgcagtggcacgatctcggctctctgcaacctccacctcccgagttcaagcgattctcctgcctcagcctcccgagtagctgggattacaggcatgtgcccccctctgtctctgggtctctgtcctcctctctctctgggtctctgtcctcctctctcttggtctctgtcccccactctctgggtctctgtccccctctccctggtctcccttcccctctctctgggtctctgttcccctctctctctctgggtctctgtctccctctctctctgggtctctgtgtccttctctctgcctgtccccgccttctctctggatgcagctcaggtgctgggtgctggttccagctcctgctgcccccctcacctctccagcaggcaccccaaggtcattactttttccatttcacagagaaggaacttgaagcccgttagaggccgacactcccctgcagccccacagcgagctggcagctgtgtcagaccttgatcctggctgcctggggtactttctcaggcttcacgatccagtgggggatgtgactcagaaatagctctggtgggaggcaaacggctgcaagtgctgcctgagggacactccccaagacagggcggagagctcttctgtctgagggaggagatgtctcccagacatccttcccagcccagactctttgccctgttctctgcagctcctcctccttccctggaccctcgcccaggctcccctctggcctccctgcctcagtctctcccctccaaacatcccccactcagcccaagggagtcttggggagagaaagcccttttgcattagtgacaaaagcagcagccttcttgtcttggtcctgcttcttacaacccctccaaccttgaccttgtggaggttactacaccactgtctaccttagttgtttcttttttttttttgagacggagttttgctcttgttgcccaggctggagtgcaatggcacgatttcggttcactgcaacctctgcctcccaggttcaagcgattcttctgcctcagcctcccacatagctgggattacaggcatgtgccaccacgtccggctaattgtatatttttagtagagatggggtttctccatgttgatcagcctggtctggaattaccgacctcaggtgatctgcctgcctcagcctcccaaagtgctgggattacaggcatgagccacgaagcccggcctcaaatatttttttaaaaaattagctgggtgaagccgggagcggtggctcatgcctgtaatcccagcagtttgggaggc[134 bp omitted]gaggcagaagaatggcttgaacctgggaggtggaggttgcagtgagctgagatcacaccactgcactgcagcctggcaacagagcgagactccatttccaaaaaaaaaaaaaaaaaattacctgggtgtgtggcatgtgcctgtagttacagctactcgggaggctgaggtgggaggatcacctgggcctggggaggccaaggctacagtgagccaagattgtgcctggactgtcatgctgtcactccagcctgggcaacagaacaagacccagtctcaaaaaaaaaaaaaaaccgaaagaaagaaaaaaatttgtttagctgggcacggtggtgtacacctgcagtcccagctacttgggaggtcaaggtggaaagatcgcttaagcccaagggtttgaggttgcagtgagctattatcatgccagtgcactccagcctgggcaatagagtgagaccctgtctcaaaaaaataaaataaaataaaaagaaagaaaaagagaggccaggtgcggtggttcatgcccgtaatcctagcactttgggaggctgaggtgggcggtcatctgaggtcaggagttcgagaccagcctggccaacatggtgaaaccccatctctactaaaaatacaaaaattagtcaggtgtggtggcgctcttgtaatcccagctacttggaaggctgaggtgggagaatcacttgaacccaagaggtggagtttgcagtgagccaagatcgcaccactgtactccagcctggctacagagtgagactccatctcaaaaaataaagaaaggaaaagagatatttgttaaaaagaataaatgtggctgggcatggtgttgcactcctgtaatcccagcactttgggaggctgaggcccaaaaattgcttgagtttaagaccagattgcacaacattgtgagaccctgtctctacaaaaattattattattgttattattttttttttgacagactctcgctgtgtcgcccaggctggagtgcagtggcgtgatctcggctcactgcaacctccgcctcccgggttcaagcaattctcctgcctcagcctccacagtagct[200 bp omitted]caggtgtgtgcctgtggtcccagctactcagaaggctgagatgggaggatcctttgaacccaggagttcgaggctgcagtgagttgtgattgtgccactgcactccagcctgggagacagagcaagaccctgccttaaaaataaataaacaaaagctgggcgtggtggctcacgcctgtaatctcagcactttgggaggccgaggtgggcagatcacctgaggtccggagttcgagaccagcctgaccaacatggagaaaccctgtttctactaaaaatacaaaattagctgggtgtggtggcacatgcctgtagtcccagctactcgggaggctgaggcaggagaatggcttgaacccggccgggaagcagaggttgctgtgagccaagatcacgccattgcactccagcctgggcaacaagagcgaaactctgtctcaataaataaataaataaataaaatttaaaaataaaggaacgaatgtatgcatctccgttttacagatgaggaaaccagggctccctgaacatagaaagtgctagtgaatcttatcagcatcattaagatcatggctattgttaatgtggttctcagtatctggtagagcctgttttaggcctggcccaggggaagccaggtggggggtgaggatcagaggtgcagtgagttaaaggacccatttgtaaccctctatacttttgccagaaattccctaagtccccctaaatcttgctcatctctcagttttgccccagattcttagctgactcccctcagagaactcctactcactcactaaggtccagttgcaagacatcctcctccaggaagctttccctggtaccccccagcctggcttgaggggcctttctctgggatctcctccgttagggaatttctcaccctagtctgtgtcttttgcccccaccagactgggagctccccaagcacagggatctggcctgtttcctgagcccagcctcactggggacatttgggagtgactgtgtgaactgaagaccacccaggccaggcacgggggctctcgcctgtaatcccagcactgtgggaggccgaggtgggaggatcacttgagcccaggagtttgagaccatcttgggcaacacagtgagactgtctctaaaggaagaaaaaaaaaagaccaactcccagattcatggctggctgtcagagaaggaggaggcagttcccagttagttcctctgggtctcgaatgaccagaacattctaactccaagtcaaaaacaccccacccccgtcctaagtatttgctaccaccttgtggaggacctcggtcctccccagcgggtggtgtggagggccctcaccaggatttccgtgatgtctgcgtcatccggatcccagggtagggtaggggaggcagggggcccagccagtgtgagttggccgctgaggtcttccactgtggagtctgtccccgtggagtcagtgggctccatggcggccaggttgagcagtgacacgttggtgcaggccgaggaccgtttgaggttcaggcaccagtgcatgggctgatgggacatctggggctccaccctgcagagaagaaacaggcagaaaagtggagaagcagccccagggtgtctgggccctcctgccttcctttctccatacctcaccccctgtgactccaccctcactgtatataagtttctcccttctctgtccccgctgcctactttattctccttccctgtgctgcctactttctttcttttttctttctttcttttttttttttttttgagacagagtctcactctgttgcccaggctggagtgcagtggcgcgatctcagctcactgcaacctccgactgcgggtcccagttcaagcaattctcctgcctcagcctcctgagtagctggggttataggcatgtgccatcacgcccagctaattttagtatttttagtagagatggcttt[144 bp omitted]ttctcctcccttctctgccacctactttcttcttcattcactagcctcccttctccttcttccctccccactggctttttcctctctccatccatccccattaccttcttcctccctccatccatccccattaccttcttcctctctacctccctgtgacttgatgtctcttcactgctgccctctttcctgcccccgacctgctggcttttccccctccccttcctctagcacccacagtcggactcctgctctgttggaggtagtgctgggcattagaaccatccctgacagtgtgcaacaaacccacccgtggaacgacacggccttctttttcttcgggatccccttggcccggctggtcaccctccggggagcctctgggactagctgggagcagctctccacccccgtgggggtgtccccggcctcatggatctctttggactgccagatcgtcttcaccaccacgctcgccatggtgtgggggtctggctcccagggaggggctccttcctctgagacttcctacctactgtgaccacagaccctcaggatccactgtcccctcagcctgcctcacaaaggacccaaccactgggccccagtgagtggggggcacagggtagggagagatgctggcccaggtcattcccctagggttctcagtggactcctcctgttcaggattctagttacatgcccaatgtgccccccgtcttcagagctccagtggatggattcatgctagcctgtaacttaacaatgggtcggcccacggattcttgggagaggtccaacttccctctccctgagactaagcgtggggtcacacagccctgtgcacttgttcttgattcttcatgtagcttcctggatttgacaattggctggggtttgagagactgtggtcgaagagggctgagatccagaccctgacctggagggtctcatattctatggggcgtcggggtcgggggaaaggcaatatacaggtagatcaacaaaagaaagctaggtgcggtgggcctcggggtcagggtagaaggtgagggaggagaggaaggtagagagttggggcaggacagagggtggtatccccctcccccgtttatttatttattattttctttaatactttttattttttttgagacagagtctctctctgtcatggaggctggagttcagtggcgcgatctcagctcattgcaacctccacctcccggggttcaaccgattctcctgcctcagcctccccagtagctgggactacaggcgctggccacaatgtccggctaatttttgtatttttagtagagacgggtttcaccatgttggccaagttggtctcaaactcccgacctcaaatggtccacccgccttagcctcccaaagtgtgggattacagacatgagccaccatgctccgctataattttttttttttttttttagatggagtctcgctctgacacccaggctggagtgcagtggcgtgatcttggctcattgcaacctctacctcccagtttcaagcgattctcctgcctcagcctcctgagtagctgggactacaggtacctgccaccacacccatctaattttttttttgtatttttagtagagacagggtttcactgtgttggctaggctagtctccaactcctgacctcgtgatctgcccacttcagcctcccaaagcattggaattacaggtgtgagccactgcgccccgcccgcccaaagtatttaaaaaatatatggaacatgtcacaaatttgcatgtggtctttgcgcagggcccatgctaatcttctctgtatcgttccaatgttaatacatgtgctgtcgaagcgagcactgccctgctatttagggacagacttttcctgttctcttcacacttctcaaaaagactagttcaaacatcactgctaatagacattttaaatgctgttatccccagggagaaagtacttcttcctggtcatgaatggactccagttcttggaac[135 bp omitted]acactgtctctacaaaaatacaaaaattaggcgagcatgatgacgggtgcctgtaatcccagctacttaggaggctgaggcaggaaaatcgctttaactcgggaggaagaggttacagtgagccgagattgagtcactgaactccagcctgggggacagagagagactctgtctcaaaaaaaagaaaaaaaaaaaaggccgggcgcagtggctcacgcctgtaattccagcactttgggaggccgaggtgggcggatcacaaggtcaggagatcgagaccatcctggctaacacggtgaaaccccgtctctactaaaaacacaaaaaattagccaggcatggtggcgtgcgcctgtagtcccagctacttgggaggctgaggcaggagaatggcgtgaacccgggaggcggaggttgcagtgagctgagatcgcgccactgcaccccagcctgggcgacagagcgagactccatctcaaaaaaaaaaaaaaagaacttcaagtcctgggattaataatttttcttgtgtttaatggggctgctttatgttcttcaggggcaaacagcacccccctcccatattagaaatggactctccctgtgactaaaacagctgagcaatttctgtcctcctggaatccaaaatggactttcccaggccccattcctggaaacccaaatggacgcatccattgagcctggaaggtgggctcttctcaacctcctttccatctcccaggattcagaatggccattccaaaggtccagaacacacccccaaggctcattccaggaattcttggcttctgagattagaaaaggctgatggggtggagttttgttcctacaggtgacagaaatggactcttccagttccctttgtcccaaatttctcaatctcctggggcgttgggagttctggccgttttgccttccccaaagccagtttaccaaagagtctctggggagctgggggttggggatggaggctggggctgggccaaagcagattcacctatttcttcttttaacaaatgttgttgaaactgttcaaggccaggtcccattcttgcccagaaggagttcccagtctggaggagacaatcaattttggtttgatatctgctacaatggaggctgcccgagagacactgcggttggacaaaaaaaaaaaggcaacatatattgaaaagtaagccaagatacggtttacgtttatttctgctttttcacttccaagctgtgtggccctgggcaagtcattcgccctctcgacctaagttttaacttctgcttaatgggactagccttgaattactgtttttcactctgagattctaggtctcctgacaactcaagtcccgacacgttggctgcagagaaggggggaggggaggaaggcttcctagaagaggatttcagcagtcgggggtgacagtggagggagaaagggaacacggagacgcttgcgcagtaaacaccgcacgctctcttgcctcgcccaaccccttctctgcagcagggaattgcaggcgtcgctccacctatcccagccgagcggagtgacaccctcccctctttccttctctactgatcttcgccttccgcccgccccacagccgcccaatggagggctgaagtaggacagatctcgccaatccgcgacgcctgcggggcaggtctacccgttcattggtcccagtcaacctaagtcccgcctcctaggaccgttccccgccttccttcacgtccctcccttcctccttggagagccgctagatccaatcagtgtttgacctggccgcgcggagggggcgggcccatgatacgcaatcgaaccccgcccgtctctcgggcaacgcctcctcccccccctccccagctcccaaacggaaatagcggaacactgggccaatcgtagcgtcgtgcctttgcttggcggccaatgagagaggaagtgggggagaaacccgcctgtgagcggcaggagctcaagccagtgggcggctcagagctccggaccgcgggcggaggggaggggcagggggcggtgccacggcctgccagcccgcccgcccgcccgccagccagccctccccgcggccggctcggctccttggcgctgcctggggtcctttccgcccggtccccgcttgccagcccccgctgctctgtgccctgtccggccaggcctggagccgacaccaccgccatcatgccggccgtgtccaagggcgatgggatgcgggggctcgcggtgttcatctccgacatccggaactgtgagcgcgcggccgggggacactggagacgcgggggaggggggagcgtgaaattgaggggtttggggatcacagagggacccgggggatcaaaagcctctgcggccgtatagggacagcatagatgggccccaggaagaactttagagtggggggcacgtaggggcttggggtgtcatagagtgcctcttgaggtgacgacacggagtagctagaggggtccgggagggcttgaaaggggaggaagccagtgaggtcccggggatgggagcatagaggtgtcccctgggaaagactgaaaagctgggggatcttacaaacgatggggttagagggattcccaatgtagagaagaagtgaaagaagtgtatggcgggggtgccctgtggagcgatggaatgggaagaggccagaggggacctggaggaagtggaatgccggaagcctaatgaagcagggcttgaggacctgggatagggggtgtcatacaggggaaaggggttagataggtcaccgaggctcctggccagtggtatagaggaggcctgagagtggttgaaagtccatgagtttggggcagggagatgatgggacggggagactataaggacaccctggtgaaggatagaggggcttcagggtgggagattgcctagaagacatggaaggcagtgtggagggggctagaggggcagctgaggggaaaggagggacccaaggaacacagaggaaaagagctgtcggtgtaaggtcttgggagaacctgtgacagggaacggggggccaggaaagaagaggacattagagtaggggattggggaaagggtagaagaaggagcgcccagacctcaaggaaggcgttgggttctgaagtgcttgaggggtagatatctggaaagctgggaataggggaagtctaatcccagagagaggtcaggggtcaggcagcaggacaggcagggatctgagcccttttctatttgaccacagtaatatggggacggtggtccctgccaggaagagttgtcgtgacgatgggaatcctggcggcaagtcagctctcaactcctgggaatggctgtgggtgattggagctgccaggagtcttcagaggctgcatccgcatgggctctggggtcagccagacttgggtttgcgtttgagcactgccactccctggctgtgtgaccttgaatgagggacttcacctctcggtttcctcatctgtcaagagagactgctgatagtatcttcctgaggggcttgtgacaatgcccctcaggcctttcactcgttccaggccccagatggaacttggctattgtttttactccgttggctctgaacagcagccctgtaaagtacccagtgatggttgttgttttagaatttaactgttatggaaggatctggcatgtaataggtgctcagggaacaggagggtggaaacagttgagtatcagttggaggagaaatgatcacttgttatgataaggggcggggctatgggggttgtggaggagctgggagccactgttagcagacgggggctgcctctgttacccaccagggatgtgaccctccacgagttgtttaacctctttcaggacgttttcttgtctgcaaacttcattcataacagtgtcttgcctctgaaggctcatttattcattcattcacttgacaaatactttttgattgctctagtgttgtccaggccctgttctaggtactggggtgacaatagtgaacagaaattcctgttcttgctggtcatggtggctcatgcctgtcatcccagcactttggggggccgaggtaggcggatcacctgaggtcaggagttcaagaccaacctggccaacatggtgaaactccatctctactaaaaatacaaaaattagccaggtgtggtggtgggtgcctgtaatcccagctactcaggaggctgaggcaggagaatcgcttgaacccgggaggcagaggttgcaatgagccgagattcacaccattgcactccaggctgggcaacaagagtgaaactccgtctccaaaaataaaaaaaaagaaaaagaaactcctgtccttgggagctcccttccccgaggaagacagaacatatgcacagggaacaccctgatatacaacctcaggacctgactggttctgtgaagaaaaataaggaggaaatggtcgggagagggactaggatggagagggtactcagtaggcctcgtggaggaagtcatatctgagtggagcaagccctgtggattttggaggaaaggggtcctggcacagggaggtgcattcagaggtcctgaggttgcggcatgcttgacatgtgttcgagcgagagggagaaggtcagtgtggctgaagctgtgggagtgaaggggagagagggcgggtgtggaggggagtgggaacaggatcgggaaaggctttctgggccatggtgagcactttggcctttgtctgcatgagaatattttgagcaggggagggatgtgaccgattgatgttttaagataattcctctggctgctgtgagaacagattctagaggtagccatggaagcagggaaccaaattaggagggtgttgcaggcctctgggtgagagatggtgctggcttaacagggtgagaagggactggtgagaaatgggttggtgatacatttttttttccgagacagtctctgttgcccaggttggagtgcagtggcacgatcatacctcactgcaacctccgcctcccaggttcaagcaattctcgtgcctcagcctccccggtagctgggattacaggcacccgccaccacgcttggctaatttttgtatttttagtagacgcagggtttccccatgttggccaggctggtctcgaactcccaacctcaagtgatctgcccgccttggcctcccaaagtgctggcattataagcgtgagccactgcacccagcctgggatacaacttgaaggaaaaactgtcaggatttgcaaagggatttgatgatgggggttggggaaggaaagagatcgtcccgtcactgcaggaccccagagacgagccagaggacagaggggagatgcaggcttggggcactggtagtaatttagccacaggaattagggctggagaatcaggagccttttcttagcaagcgtatgttgaacggctggtatgtctcaagaattgtgctgaatgctggggacactggtgaacaggacagacttgtccaccccctccatgaagctcccagccctgtgggggagaaggtgcaacatacaaattgcagtagtccttcacactaatacctggacacggatgttcactgcaacattattcatgatagccggaaaacagaaacgggccaaatgcccatcaactgagaaataaagtgtggtctatgtagtggaatattaccgggccttaaaaaataatgacgtcctgctacatgctgccacagggatggaccttgaaaacatgacaccaagtgaaagaagccagacacaggaggccacgtgttgtatgattccatgttgatagagtatcttgaataggcagatccatggagacagaaagattagtggttgcctagagtaggggctggtgggatggggagtgactgctcatgaatgcataggttctttttttattttttgagatggagtctcactctgtcgcccaggctggagtgcaatggggtgatctcggcttactgcaacctctgcctcccaagttcaggcgattctcctgcctcagcttcctgagtagctgggattacaggcgtgtgccaccacacctggctaatttttgtacttttagtagagacggggtttttacatgttggtcaggatggtctcgaactcctggcctcaggtgatccactaccccagccttccaaagtgctaggattacaggtgtgagctaccatgcccggcagcattcagagcttcttttgggttcatgaaaaagcctacagctggacacggcacatgcttgtagtcccagctacttgggagactgaggtaggaggatcatttgaacccaggagttcgaatccagcccgggccacatagtgaaacctcatctcttaaaaaaaaaaaaaaaaaaaaaaagaaaggtcctggaattcgatagtagtaatggttgcacaacatcatgaatgtactaaagaacgctgaattgttcactgtaaaagggtcaattttatggtatgtgaattgtatctctttttttttgtgacagtcacaaaaatggcgcgatcttggctcactgcaccctccatttcccaggttcaagcgattctcctgcctcagcctcccgagtagctgggattataggcgcccgccactatgccccgctgatttttgtatttttagtagagacagggtttcaccatgttggccaggctggtctcgaactcctgatctcgagtgatctgcctgcttcagcctcacaaaatgctgagattacaggtgtgagccaccgcgcctggccgtatctcgatttttttttaaatggggaaagaatttgcagctgtcctaagcccagtgaggaagagggccatggtgttgagagaatggggattctgtgtggtcagcgagctgcggcctggctttgcttcacaagagacctttggagctgtgtgggcaggaagtaggggagttacctaggctgagggcagtgagaagagctgtgaaggcagaggcggggcaagtgcaaaggtcctgacttccggacgccatggcgggcatctctatctagtcccagctactcaggaggtggaggcagaaggattgcttgaggccaggaatttgagaccagccttggcaacatagcaagaccctgtctctctttcttttttttgacagagtctggctctgtcatcccggctggagtacagtggtgcgatctcagctcgctgcaacctcctcctcctgggatcaagctatcctcccgcctcagcctcctaagtagctgggactataggcacatgccatcatgcccagcaaatttttttgtatttttc[137 bp omitted]atgttgcccgggctggtctcaaattcctgggctcaagtgatctgcctacctcggcctcccgaagtgctgggattacaggagtgaggctcagtgcctggcccccttctctattttcaagaattcttttttttttttggaaacggagtctcgctctgtcccccaggctggagtgcggtggtgcgatctcggctcactgcaagttctgcctcccgggttcatgccattctcctgcctcagcctcccgagtagctgggactacaggcgcccgccaacacgcccggctaattttttgtattttttttttagtagagatggggtttc[143 bp omitted]gtgagaccctgagaaaagggctgtgtggctggtgcagagagggatgggatctgacgctggggagtgggcagaggctaggtccgtgtttgtcctgagagctctggagaaggtttcaagcaggagcgagggaagagaagggcggagggatgcggaggaggaggtggggagaggcagggctcagagagcagcagagggaagagtgtggagccagccagcaggaggatctgaagggcacagtggggctatggggaagggtctagaaggtgaaaggcaggctctaaggagggcagggagggcaaattctgcagataaggagggggagaggttgaggctgggcccagcccgagggcgtgttctgtcctgtctgcagcaggaatacagcagaagtattatctcacagggagcaagggctggggctgcctcctatctaggcagagtctggctggagtgggccttaggagagttggacgagtgagccaatgggagcggggtgctggctgcacactgccctgagctcttccatcagagcacatcccactccaaatggtgatccactgcagtggtgacatcgagcccaggccctgggtctcactccagctttgtcctctgtaggttctagcccatgggaggcctcaggagatgattgccagttgaatgaatgaatgaatgatggaaccagtctttcttgagttccagctgggtgccaggcactgttctaggtgatggggctacagcagtgagcagaagttcctgccctagggtgctcacgttctagagaggagatggtccactacacaggtgaatattttgggggccggacaggtgggagtaggtgttgatggaaaatgaggcaaggaaagggcttggggatggagttaaggatgatgctcttatataggctggtcagagagtgtcgctgaaaaggtggcattggagcagagaatctaactaagtgggggaatggtgcatgcatgactctggaagagggagctgcctgtgcaaaggccctgaggcaggattgtgcttgtagtggagcagggacttaggaggaggagagggcagctcctgccttggagagagaggacaggagaaccggccagagagggaacagggtagatggtgcaggcccttgtgggctgcagtgagaactttacttttacttcgaacttgctgggagccatggaaggggtttggaggagtgctggggtctgactcaagttttcacatgatccctctggcctctgtgaagagcacaggaagtcaaacagatttcaatttggtatcccttaagaacgggacagatgcaggcctgagccccagccccacccgtttccagctggttattgtgtgatggctttggtccacaaatccgcattcaacacctcccctgtgccaggctgccctgggccctgggaacactgtggggactgaagcagccgtacatccctggcctcatggcactggtgttccgatccaggaggaaatgaacatgcaaacccttaatatgtaaggaggcaactcaggcagggtcttggtggcccaaatagttcgccctgctgagcaggggggctgaccaggagaatgagagggtttgattttgttatttacgaagaatatattttcatcacccaggaatagtgatgaccttgagaatatgagtggtgtaacccagcaccaaaatgcaagccatatatatgttgaaattttcttttttttttctttttttgagacggagtcttgctctgtccacgcccggcat[143 bp omitted]aactccgtctctactaaaaatacacaaattagctgggcctcgtggcacacctgtagtcctagccactcgggaggctgaggcaggagaatcgcttgaacccaggaggtggaggttgcagtgagccgagattgtgccactgcgctccagcctgggtgacagagagagactttgtctcaaaaaaaaaaaaaaagcaaaacaggctgagcatggcagctcacgcctgtaatcccagcactttgtggggccgaggcgggcagtttggttgagcccaggagtttgagaacagcctaggcaacaagatcctgtctctccccaccacaaaaaaacttttaaaattagccacgcatggtggcatgcacctgtagtcctagcttcttcggaggctgagatgggacgatcgcttgagcccaggaggtcgaggttgcaatgagtcaagatcgcaccaccacactccagcctggacaatacagcaagaccctgtctccatatattttttaaaaaagcaaaataatcagtgaaattcattttaatatattttctttaccctagtatatccaaactattatttcagtgtgtaaccagtgttttttgagatggagtcttgctgtatggcccaggctgagtgcagtgtcaggatctcagctcactgcaacctctacctcccaggttcaagcgattctcctgcctcagcctccctagtagctgggactacaggtgtgcaccaccatgcccggctaatttttgtatttttagtagatatgggatttt[132 bp omitted]ctgcctgtctcagcctcccaaagtgctgggattagaggcgggaggcattgcacccagccttcagaaggctttctgaggattcagggctgctggggcttgtacaggaagcacatcaggtctcggtctctgtagaggaaatgtccttggtctagaaggctctgaaggcctttgcggtgagatgctgggtgatgcctgtgttaccttcataaatgcacattagtccctccagggcagggcccaggtttgacaggatgcctttgctggtagtaacagacccaccctgatctggggcttacatgtttagggaaggcgttatctcccctaaccagaagctccaaggtaaggcagctccctggccccgtcagcacttcccttgactctgccttactctgcctggagcaagatgttggccgccttcgcacccgaacacccctcacggcaacagccactggacggagcacggcctgcccctcccatggccccccccagcacctcagaaaactctggagaggctgcgtggtctggccccacctgctgtgctcttctccacccgcccccgccgccgcccgcatcctcagactctgtgcctctttcatcaccgtccgcctgccttgcctcatgctgtcctacctccaggccattgcacctgctggtcctcctgcctggagcgcgcctccccttgtttctgcctggtccatttcagcctcatcttttgatcctcagatcccagcagctgtgtgcagagaagccttccccgtcccctgcgccattctcattttagcctctcagccccgaaatgtgtatacctctttcagaatacttgccactgtccctgtctgccaccactccaatccagggatgcctcgagagcagggtagatgtgactcatccttaagcctggccccagaaatcccattgtgaatgagagaatccctttaaaactctctcacaggcttgcttgcctcctgtgacagtgagctcattccccctgttgctggccctgaatgccgggtcattcttcccatgatcctggtctgtcagagctgcctcagccctttccccaggcaccaccccagtagcacccatacagtatccctgggctccctggccatcacgggcctttagatctttgcagagctgggcctctgccagagccctccctttggggccacaactgctcctgttttgaagaccgagagcttttcttctctctctgaattcctttttttatagcaaattataccagttatgcagaagatagcatcaaatagatgtggaccatttaaagcctatttaaaggccaggtgcagtggctcatgcctgtaatcctagcactttactttgggaggctgaggcgggtggatcacttgaggtcagaagttcaaaaccagtctggtcaacatggtgaaaccctgtctctactaaaaatgcggaaaaaaaaaaaagccaggtgtggtggtgggtgcctgtaatcccaactgctcgggaggctgaggtaggagaatcgcttgaacctgggaggtggaggttgcagtgagccaagatggtgccattgcactgtagcctgggtgacagagcgagactctgtctcaagaaaaaaagtaaaaataaagcctatttaaagaaaaatatacatatatatgcatatttgtatatatatgtaaatacattttaaatacaatttaagtaatactttaaaaagagatttccagccgggcgcggtggctcatgcctgtaatcatagcactttgggaggctgaggcgggcggatcaccaggtcaggagattgagaccatcctagctaacatggtgaaaccccatctctactaaatatacaaaaaattagccaggcatggtggcgggcgcctgtagccccagctacttgggaggctgaggcaggagaatggcgtgaacctgggaggcagagcttgaagtgagcagagatggtgccactgcactccatcctgggcgacaaagcgagactccatcacaaaaaaaaaaaaaaagatttcctggcagtaagcggtggcccatgcctataatcccagcacttcgggaggctgaggtgggcggaggagttgagaccaccctgggcaacatggcaaaaccctatctctacaaaaaatagaaaaaaaattagctgagtgtggtggcgcacctcacagtcccagctacctgggaggctgagatgggagggtcatttgagcccaaggggccaagactgcagtgagctgagatcaaaccattgcattccaacctcagtgaaagagtgagaccccgtctcaagaaaaagagaggaaatctatatattatagatataataatatgtatttctttaaatgaatactagttaaagaaatacgtaaatataaatatataagtacatatgatatatatttctttaaatttaaagaatatttaaagaatacatatacatgcacatatttgtgtatatatttaaatcatttcaagtacaattgagtgaatacactcgtgtattaacgatggggatatgttctgagaaatgcatcgttaggtggttttgttgtggtgtgaacatcctggagtgtgcttacacaaattgagatggtatagcccaccactcactgaggctctgtggcgcagcttgttgctgctgggctgtaaacctgcacagtggccaggcgtggtggcttacacctgtaatcccagcactttgggaggctgaggcaggcagatcacttgaggtcaggagtttgagaccagcctggccaacgtggtgaaacctcgtctctactaaaaatacactaattagctgggtgtggtgacgcatgcctgtcatcccagctactcaggaggctgaggtaggagaatcacttgaacccaggaggcggaggttgcagtgagctgagatcacgccattgctctccagcctgggcgacaagagtgaaactgcgtctcaagataaaacaaaaaaacctgcacagcatgggactgtcctgtaggcaaccgtgactcagtaagtatttgtgcatctaaacatagaaaaggagcagtcgaaataaggcattagaatcgtatggaaccactgcagtgtgtgcggtttgttgctgactgaaatgttgatatgcggggcaggactgtattgaaataatacatattatttaaattaagtaatacatatatttaaataacacatattctttaaatatgtgtatactctttatatatactatatttatggtatgcatatgtatatatacgtatttatgacaaaaccatatatatataggccaggcatggtggctcatacctgtaatcccagcactttgggtggctgaggcaggtggatcacttgaagtcaggagttcgagatcagcctgggcaacatagtaagacctcattgctaccaaaaaaaaaaaaaaaaattagggctgggcgaagtggctcactcctgtaatcccaacactttgagaggccaatgtgggcagatcacgaggtcaggagattgagaccatgctggctaacatgctgaaaccccatctctactaaaaatacaaaaaattagctaggggtgggtggcaggcgcctgtagtcccagctacttgggaggctgaggcaggacaattgcttgaacctgggaggcagaggttgcagtgagctgaaattgcgccactgcactccagcctgggtgacacagtgagactccgtctcaaaaaaaaaaaaaaaaaaaaattagttgaatgtggtgttatgcacctgtagtcccagcgactttggaggctgaggcacaagaatcactgaacccaggaggcagaggttgcagtgagccgagattgcaccactgcactccagcctgggctacaaaaaaaaaaaaaaaaaaaaaaaacagaaacaggcaaaattaattttaataatatgtctctataacccagtacacccaaattattatttcagcatgtgatcaatactttataatttgtattgttttatttagttgacacacaagttctcactgtgttgtccaggctggtctccaactcctgggctcaagccatcctcctgcctcacatgcgtgagccaccacgcctagcccctataatttttactgaaatattttacattttttctccacactgtcttctaaatcccgtgtatgtttgctgttgacagcccctctcagtttggaatggccacatttcaggatctcaggagccactggctggcaactgctatattggatggtgcagcgctagggtcctcttagcactgatcaggaggtgctaatcagaggggcttcctggaggaggtgatacctgaagtgaggcttatgggagcttccatagaagttgggagcagggacaagacaggatttctagagagaaggatggcacatatacttgctttctcagtcattgactcatttgttgaatgcacaccccaccctgctggggactacgccctgaaggatgtgggtcagagcagatctctgccccttccataactagacatttatagagcacctgctgtatgcagggcactgctctaggagctccctcctgatgcttacagtctgaagtgggaggaagttcgacagtggagagaaataaaattgtgacatggtgaaatgtaccagagaggacttcttgaaaaataactctttaagcagaataataaagaattgactttaaggaagtgaaacggaacggcctttcaggggtggcaggagccgagacccaaatgatgggaagatgacaggggaggggtggccccaggaagagggcacagcttgtgtgaaggcccttgaggcaagaggatgtgcgtgttcccggagcaaaatggaggccagggggcctggatggacagtaggggtctgaggggtgacaccggcagggttgctgtgacaggggcagaggacttgatgggccgtggagtggagcacccccagctggcatcacagagcccaggatatggaaacacgagggaggcaagaaggctggaggggaggctgcttcactgacctgagcgagcgagcatgggatctggatgaagtggtcatcgtggaggtgctcaagacatgttctgaaggtcaagttaggaggaggtggctgggcacagtggctcatacctgtaatcccagcattttgggaggctgaggtgggaggatcgctggatcccaggagtttaaggtcacagtgagctatgattgcaccactgcactgcagcctgggcgacagtctaagaccctgtctcaaaaattaaaaggacgaggcagtagcccgattggcgtgaggatgtccaggttctgtttggaggagaagagggaacggtagaacctgtcaagggagggatgaagtctggggtgagtggaacagggacaggagaagcagagagggcagccgagagcatccagtcggattgtgctctgaagggggtgctgtagggcattgaggagcatggaggaagcagagacctggcctgcaggatcaggggaggctttctgtgcttattccacaagcaggtcctgtcagaggtgtaggaatgtcccagacaaattggggagaggttggcagccagagaacaggaggcagtggggacaggccacgcgggagaggacaaagccatggctgtggggacaaagggggtgaggacagcacccaagggtctgacctggtgactgggtggacagtgggaccttcatgggattgagaactggaagaggcagtgagctcagtggtaggggtgagcaccctgcggccagccaagctctttattcattcattcattcatcacatgttcatcgcatgtggggagtggggacaggagctctcagggagcgtgtctggggccctgaggagccccacaaatcaggggccacagtggtaggaggaaggagagaggaagtcagggacagcccaagggtgtgtgctctgtgctgtggggctcagccagcggtggttcttccctctttgaaactcccagccagagaaggggtcctggcctgtcctgagccccagggcttgggggcggagaagatctgcccttcctgctgggtggggccgcgcctaggaaagagagggcaggtggctgactccccagacccctcactgcctaccctcctcctcctctcccaggtaagagcaaagaggcggaaattaagagaatcaacaaggaactggccaacatccgctccaagttcaaaggtaggctgggggcccaacttctggttctgagggaggagggggctgggagctggggctcctgtgacctatcctgtgacccttccttatttctggctcccctttcctccttcctctgccctaggagacaaagccttggatggctacagtaagaaaaaatatgtgtgtaaactgcttttcatcttcctgcttggccatgacattgactttgggcacatggaggctgtgaatctgttgagttccaataaatacacagagaagcaaatagtgagtctggagaggggggtgccagggcctggactcctgggtctgcgggggagggggctggaggtctggactcctggatctgggggaggagggggtctaggggtctggactcctgggtatgagggaggagggggtctggggctctggactgctgggtctgagggaggagggggctgggggtctggactccccattctgagggaggagggctggaagcccagactcctgggtctgagggttgaatctggggcctggactcgtgggtctgagggaggaggggcctgggggcctggacttgtgggtctgagggaggaggggcctgggggcctggactcctgggtctgaggttgaatctggggcctggactcctgggtctgagggttggatctggggccactcagtcacaaggctcctagccatccacgacctccctccccacagggttacctgttcatttctgtgctggtgaactcgaactcggagctgatccgcctcatcaacaacgccatcaagaatgacctggccagccgcaaccccaccttcatgtgcctggccctgcactgcatcgccaacgtgggcagccgggagatgggcgaggcctttgccgctgacatcccccgcatcctggtggccgggtaaggcactggggacccgttggcagtggggggcctgggggtgatgagtcccagccaagtgtgaggctcagagaggctctgttgcctgcccaaggtctcccagccgagatgtgggctaacgctgggctggggacccagtggttccggtggcagccccatacttgtctcttcccgtgatacgaagctgacttgatggtgtgaggctgctcccggcaaagccagtggggtgtttctgaactgcagaattctaacacctacgataagaggcgtaactgtgctatgtgggtgacggccctccagaacttcctcatcttctccattcattcaccaaacatttactgagcacatactatgtgccaggcactgtgctgattgctggggatgttgtattgtccagagatggacacggtcattgccctcctgtgttcatggtctggagcaggagacaaatggtgatggaagaattgcaggatgaagtgtagaatttgccaggtgcgatggctcatgtaatcgctgcatttggggaggctgaggcaggtagattgcttgagtctaggagtttgagaccagcctgggcaacatggcaaaatcccaatctctactaaaaataccaaaaattgccagggcatggtggcgtgcacctatagtcccagctactcgggaagctgaggtgggaggatctcctgagctggggaggcctaggctgcaatgagttgtggttgcgccagtgtactccagcttggtgtgcacacaggtgagacttctatttctggcagtgtggtcagctagatacccgactcatgttctccctgaaacctaactgtcaatattggataaaagaggaaagacaatattatttaatggattcatgaggtagccagaaaatgaggagcacacaggccacaagctaagagaagccgggcacccaagcagatgagccgcgtgctggagccagcatttgcttagaaggcatttgctgaactgggtgaacccgagtatcggttttggggccctgcagcctctgggaacagaagacaaagcttgtccgagaagttctcgaaggctgtacttcaaagtgagagtgacctagaaataaacccccttggggactatgaggaaaattacctgtctgaaacgttggcacggagcagccctcagactggttttcagcctgactttaccctatctgggtagtccaaaagcccctaagtcaacctttagtttaaagtgatggaaactggaggttccctagtgcttcacagaagcaaacacgagccttttctgaggaagcccattttcaccacaagcttcagtgatatccacagataaagctccaaatgatatgagtagctcacagccaaaaatctctaaacacatgacacaa[133 bp omitted]catggcgaaaccatatgtctactaaaaatacaaaaattagccaggtgtggtggcacatgcctgtaatcccagctcctctggaggctgaggcaggacaggagaatcacttgaacccgggaggcagaggttgcagtgagccgagatcatgccactgcactctagcctgggtgacagagcaagactctgtctcaaaaaaaaaaaagaaaaagaaaacagaaaataactttggaattggaattatacagaatgtaaaagaagtatatttcatatgtttcaataaataagagaagcattttaaaatatgagtaaagtttaagcagatttgaaaatataattgaaatagtcaaaaattgccaggcacagtagtggcttacacctataatccaggcactttgggaggctgaggtgggaggatcacttgaggccggaagttcaagatcagcaacatagtgagaccctattgccacaaaaactaaaatattagccgggtggggtgctgtgtgcctgggtagtccatccaggaggctgaggcaggaggattgcttgagcctgggaggatgaggctgcagtgagctatgatctcatcactgcactctaacctgggtgacagagtaagaccctgtctaaacaaacaaacaaaaaaaaccaaaaaacaaataaatgtttaaaacattaaaaattaggtgtctgaatttagttagcagagtaggcacagccaaagccagaattagtggcctggcagtagaactgaagaaagacatcaaaatgcagcccaaagaagacaaagcgatggggattttaggaaagagacaaagactcatggaagacagagaacatctaacagaattgccatttagagttgtagggagagatcgtgacataggcagtgttcgaagagagataatggttgaaaatattccagaatggatgaaagaggctgatccccagattcaaataggccaggaaatcataagcaaaagtacagactgtagggggtgactgtggggcagcaagaccagccaggcatctgtcaccaggtccaggtcagagctcgcggtggcttggaccagggctgtggcggtcatgtggttatgagaagggcatgtttcgggagtagagtcgatggattatatgtgctgtgctaggatgaggtggggacattgaacaggtgagtgaatgatggcagacctttcagcaatgtgacaaaggccataggaaaatgggtcagagagggcagaacctgagtgtggtttggtcatgctgaatttgagatgtgtattagacatctgagtaggactctggggaggaagttggattgcagggagtcagggcgggagggagagagatctgagagagatcggcaccgtccaataaaaatataatgcaaaatacaggccaggcacagcagctcacacccgtaatcccagcaccttgggaggccaaggtgggcagatcacttgaggtcaggagttcaagaacagcttggccaacgtggtgaagccccgtctctactaaaaatacaaaaattagtcaggtgtggtggcgggcacctgtaatcccagctacttgggaggcttaggcaggagaattgcttgaacccaggaggtggaggttgcagtgagtggagattgtgccactgcactccagcctgggtgacagagcgagactccatctcaaaaaaaaaaaacattagtggggtgcagtggtgcacacctgtagtcccagctactcaggaggctgaggcaggagaatcgcataaacccggggggcagaggttgcagtgagccgagattgcaccactgcactccagcccgagtgacagagtgagactccatcttaacaaaaaacaaacaaacaaaaagcaaaatacaaatgtgtgcctgtaatcccagctactcgagtgactgagatgggaggattgcttgagctcaagaggcccaggctgcagtgagctgtgatcatgcctaggtgacagtgacaccctgtctaaaaaaaatataatgcaagccacataggtgtttttctgttttctagtatttaatatttcagtttaacctgatccacacaaaatattatcactttgacactgaatcagcgtaaaaattattcacgagctattttatttgacatctgtgtttggtgctaagtctttggaatgcggcgttgcgggtgtctctcagtttggactcgctgcagttccagtgctctgggggctgttgtatctgacagcatggggattgatggcagttaagctcgggcctggtgaagcccctgagggcaggtgttaactgggaattcccaaaagctgggcccttgagtggccctggtgcagcccagcgtgttacgctctggcagggggggtgggagtcatgatcaggggtgtgggaggaaaatcaggatcaggccatgactcagaatgctaagaactttgatggaggagggagtggccagtcgcaaatgctgccagcagtttctttaggacaaggacaggcagtcagcatcagcttgggggagacagaggttacaagccaccctgaagagggaagaaccgggcactttgaggactgagagggaggccaccgtggccaacatgtgtgggtgcagatgacattgtccctggagtggatgccgaggggtggtgctctgccagggtcaaggggccagggtggggctgtctggctctaggctgccccctccacactggaaacttggcctcagcagtgactggggcacgaaggaactttattttgtaggtagacttttatttaactttttattttttggagacagggtcttgccctgttgcccaggctggagtgcagtggcacagtcttggctcactgcaacctccgactcctgggctgaagcgatcttcccacctcagccccctgagtagctgtgattataggcgtgcaccaccatgcctggctaatttttgtatttctttttttttttgtagagatggggttttgctatgttgcccaggctccaggctggtcttgaactccagagctcaagcaatcctcctgcctcagcctcccaaagtgttgggattacaggtgtgagccaccactcccatctaggctttttttgtttgttttttttgttttttgtttttttttttttgaggcagtctctctctgtcacccaggctggagtgcagtggtgcaatcttggctcactgcaacctctgcctcccaagttcaagcaattctcttgtctcagcctcctgagtagctgggattacaggtgtgtgccaccacacctggctattttttttttttttttagtagagacgaggtttgccatgttggccagactggtctcaaactcttgacctctattgatccatctgcctcagcctcccaaagtgctaggattacaggcgtgagcctctgcgcccggtcattttaaccatttgaaggtgttcagttcagtggtttctagtatattgatgatgctgtgcaacaaccactaccacctaattgcagaacactcattgctccaaaaaaagactctgtacccattagcagtccctccccattccctcttccccccagcccctggctgccaccaatctgctttctgtcacagatttgcctaatgtggacatttcatagaaatggaaccgcacagtaggtggccttctgtgtctggcttcttccactcaacaagatgtttttcaggttcatccacattgtggtgcatatccgtgatttgctcgagatagagtctcactctgctgcccaggctggagtgcagtggcatgatcatagctaactgcagccctgacctcccaggctcaggtgatcctcccacgtcagccactccagcagccgggactacaggcacaagccaccaggcctggctaatatttgaattttttatagagacagggtctcactatattacccaggctagtcttgaactcctgagctcaagtgatcctccgtggcctcagcttcccaaagtgctgagattacaggcgtgagccaccgcgcctgacttgtggttttattttttatacttgaatatgcagcttgatattgtgtagtttaacattttcctaagtagcgccatagcccttattccacttaaccaagttgataaatagctcttattcctttgtgtggtatccttatctgtaaatggagatgatagaatccgcgtccttagagggctgtggtggggagcgagcgagctgtgcgggaacacttagagcagagtttggcccagagtcaggactcgggagatgcgctgtggctcaggagatgtgtgccgtggcagcgatgggaaagtggcccagagtcagggctcgggagatgcgctgtggctcaggagatgtgcgccgtggcagcgatgggaaagtggcccagagtcagggctcgggagatgcactgtggctcgggagatgagcgccatgacagagatgggaaggtggcccagagtcagggctcgggagatgcgcgccgtgacggagatgggaaagtggcctggagtcagggctcgggagatgtgcgctgtgacggaggtgggaaagtgccgtcacaaatggagcatcgtctgtggccaggcttcttgctggtttctggttctaacttgatgaccactgggcagtgaacgtttctgtagggtgagcgtctgggggcagcactgctggtcttggtctgctgcacacacagcagtggcctttctagacagaggaagcccagagcctctccagagggcctgtccctgtgtccgcctccagctgcagcacacgagggttcccagcactttaggaggccgtagcaacaggcgtcagtcgggcgagtatctgcctggatgacggcaggagccacctgctgggtggctgcacatccagtgagacatgctgccacaggcctttgactcgtgcaggtctcccctctgaggacttctcccctgtgtcttttgctgtctgttgggtgctttctgggaaaccctttactgataggccatggctgggccagtcttgacagctcccagcacctcctcttactcaaggctatggccatgcaccacacaatctcatttctgtttttttttgagacggagtctcactctgtctcccaggttgaagtgcaatggtgagatctcagctcactgcaacctctgcctcccaggttcaagcgattctcctgccccagcctcccgagtagctaggatttcaggcacgtgccaccatgcccagctaatttttgtatttttagtagagatggggtttcaccatgttggccaggctggtctcaaactcctgacctcaggtgatccacctgcctcagcatcccaaagtgctgggattataggtgtgagccactgcgcctggcctttttttttttttttttttgtagagacagggttttaccacgttggcctggccaggccggtctcaaacacctggcctcaagtgatccgcctgcctcagcctcccaaagtgttgggattacaggtgtaagccaccatgcctggcccaccatcttatttctttctccccaaagccgacaaggctcctcattttcctgaaggggaaacagcccatcagagagggtcagtggcttacccccatctgtgccccacagtcacaacctcatgcaggcgtgtctgaccccagaaggtgctcccctgggatcctcttctagaacaacatcatgctccatgctctttgctgtgctaggagctgggttatggttggggcctggagtcagccctctgagatgggctgcccgctggctgccaggttctgtgccaggcaagtgctgaccctggtttcctgtgactgctgtgatgaattaccaccagcacagcggtgtcaaacaccggttctggatgtcggaagtccaacatccatctcacggggctaaaatcaaggcgtgggcagggctcgtcccttccgggggccctagaggagaggccgcgtccttgccttctccagctcctagaggccacctgctttccttggctcgtggccccttcccccatccccaaaggcagcagtgtggcatcttctctcctgcctgacctctgttccatcctcacatcatctctgactctgaactgtatctttcccttataaggaccctgtgatgacattgggtccacctggatcacccaggatcctctctccatctcatgatccttaactttatcatatctgcaaagtacccccacccttttttttgtttggagacagggtcttgctctgccacccaggctgcagccttcacctcccaggctaaagcgatcctcccacctcagcctgccaagtaggtgggtctacaggcatgcgccaccacgcttggctaattctcatatttctagtagagatgggggtctcaccatgttgcccaggctggtctccaactcttgggctcaagtgattctcccacctcagcctcctaaagtgctgggattacaggcgtgagccaccctaacccccagaacctgtgaatatattcccttggattcaaaagagccttgcaaagtctgttccctcacaacaggcagagggaccctttaaaaacctaagccagatcaaaaatacacccattttctcagtttgttgtggagagaagataaacgtgtgaatccacccagagacctgtgggagtgctggacaggccgaaggggtccgggggcagctgttcctgctgtcgtgttaacatcacgctgattctctgctcaccacccacagcggctttcatctcccaatcggtaaaaagccaagtcctcacttcagccaacaaggccctgcagggtctggctctctgttccctccctgtcctatctgcagccctcctgccccatggctcaggccgcagcctgcaggcctccttgctgctcctcctacacacgggctccgccttcctgatggccttggcacaggctgttccctctgcctgggatgttctgttgcagaggattttcagtctttcctccttaagttactctgttttgtttatttttaaatttttttatttatttagagacagctctaactctgttgcccaagctagagggagtgcagtggcacagtcatggtgcactgccgcctcgacctcccagtctcgagcaatcctcccacctcaccctcccgagtagctgggattacaagcctgcgccaccacacccagctaatttttgtatttttgaagagactgggtctcactgtcgcccaggctggtcttgaattcatggcctcaagtgatcctcccacctcgacctcccaaagtgctgggattataggcgtgagccaccatgcccagccctgacagtatttgatgtatgtgttttcgtggtgctgtctgaaatgtaagccctgtgaggacaagtgtttggaccactttattcaccactctatccatggagtgaacagcagtgcctggtaccccatgggcacccagtaggtgcttggtgaatgaatgaaggtgcagagccaggcttgacatgttcctgagccctgtgaggttactgagatgcaatcattttgcagatgaagacactgagtcctggtgggccgtgaggtcagcgccagactggatcctgcggccgcctggctgtctgtccctctcgctggcctcgcacacccttcctgggaggaacaggagaggaggggaggtgtgcagggctggggtcactgactctgcttcccctgccctgcatggtgtccccacagggacagcatggacagtgtcaagcagagtgcggccctgtgcctccttcgactgtacaaggcctcgcctgacctggtgcccatgggcgagtggacggcgcgtgtggtacacctgctcaatgaccagcacatggtgagcccccagccctcacacccccggatacccagggctcccacctcagccctgacccccctggatgcccggggctcccacctcagccctcacacccccggatacccagggctcccacctcagcccacgcaccccctggatgcccggggctcccacctcagccctcacgcccccggatacccagggctcccacctcagccctcacgccccctggatgcccagggctcccacctcagccctcacgcccccggatacccagggctcccacctcagccctcacgcccccggatacccagggctcccacctcagccctcacgccccctggatgcctggggctcccacctcagccctgatccccctggattcctggagcttccccctcggcgctgacgttcaccagacaccagaaaccatgatccagtgtccccggtactcattacctgcccaagtgtccagaaaccctcccatccccatctctgacactcccctggctggccagggatcctgtccagtgacccccacacccctcaccaaccacccagtcccttagaaaatcccactctgtttctaatacctggagattcccccaacagcgcccatcacctgcgcaccagcgcagaaaccttgactgtcccacccccacagtcccaaccctctagagtctcgccccttcactgctccttacccagctgcctggggtcctgccagggacaccccacacacccaggtcagtgctggccatggcgcccgaggccccgtggcctcctcaccccacccctaaagcacgcacagtgacacatgtgcacacccctaaaccccatcttcccgactgcacacacatcccgaccctgtcccgctcctgagcctctgctctcaggtaccacctcccccaggggcctgacttgtctctcctctgcccctgcagggtgtggtcacggccgccgtcagcctcatcacctgtctctgcaagaagaacccagatgacttcaagacgtgcgtctctctggctgtgtcgcgcctgagccgggtgggtgtggcctagatattggctgctggaggtggccctggcatccctatgccctctgacacccctcaggcccccactctccctgagaggcagcccagcccaaggtttacaaactcaggctctgagctggattcatcctggctcggcctcttcctggctgggtggccctggacaagtggcttcacctccctggcctcagctgccccctgtgttcagtggggataataccggtgcccacctggaggcacagagcgctgtggatagagtgctcagaacagggcctcgcgggccgagcaccccgggagccagccgccctcatgacctcctccctctcccacttctctctctgtctcccactttccctcttctggctttgcctcccgcctctctctttcctgtgcagcctctcactcctgcctggcgtccctctcccacctttgctcctgtcctgcccaggaacatcccctgaggccttgtgcatgccaggctccatgtcgggtgacaccagggacacagatgagtcagaaccaagctctgctcttaaggagctccctgtccttctggcagggaggtgactcagtcacagattgtcagaaaaggggtgactcgtgctataatggaggtaggataggtcacccataggaggcacttaacacagcctgtgagtccacgaaggcttcctgggggcggcgatcccagaattgagacttagaatacacatgcgcatctcctgggcagtcaggaagaggcctggattcgcaggcaaagagaagaacacaccagctcgtgcatccactcattgtttctttttttttttttttttttttttttttgagacggagtctcgttctgtccccaggctggagtgcagtggcgcgatctcggctcactgcaagctcccaggttcacgccattctccagccttagcctcccgagtagctgggactacaggcgcctgccactatgcccggctaa[141 bp omitted]tttctttctcaggttttttttttttttgagacagggtcttgctgtcgcccaggctggagtgcagtagtgcagccatggttcactgcagcctctggctcctaggctcaagcgatctctcgcctcagcctcccgagtagctgggactgcaggtgcctggctaatttttgtattttttgtagagatcggtcttgctttgtcgcccacactggtctcaaactcctggcttcaagtgatcctcccgcctcagcctccgaaagtgctgggattacaggtgtgagccactgcactcagcctcagtcattgtttcattcattcatcacacatctgagtactgcagtgtgccaggatgacagtgaggtaggaacacagaccagcacggaggtgggacagagcttcctggagaagggcttttcaaggttgaataggagtttgcaatgaggaaaaaaagtcacatgatctttctttttttttgagatggagtttcgctcttattgcccaggctggagtgcaatggcgtgatcttggctcactgcaacctctgcctcccgggttcaagcaattctcctgcctcagcctcccaagtagcatggatcacaggcatgtgccaccacgcccagctaatttttgtatttttagtagagatggggtttcaccat[137 bp omitted]cgaacctcttcctatctgaccttgtattaggcctagggacccaaaaaagggtcagacccaatccctgcccctgagtggcttcaagccttgtagggggactacaggaaacagcctccaggagccggtgcgctgtgtgctctgacggaggaagcctggggcatgggaggctcagagccgagtgaggagggggccctgggaaactgtcacacagaagggaaccagcagagacctttcctgcccaccacacaccagcattacttggaaagatcaaccagccgggcttagtcctagttttgcccccattcagtgtgcctgacgcttcctcgctcccttcccagagcctcagattcctgcttcataaaaccattgcattggtcgggcatggtggctcatgcctgtaaccccaggacattgcgggactgaggtgggagaattgcttgaggccatgagttcgagaccagcctgggcaacatagtgagaccctgtctctacaaaaaaaacccactaacaaaaccattaacactgacagcactgcccttggaaggcaccatttgctccaccctggcatgtggacccacgtgcccctcccaccccagcccccaacttatttcttgctcttccccgccagatcgtctcctctgcctccaccgacctccaggactacacctactacttcgtcccagcaccctggctctcggtgaagctcctgcggctgctgcagtgctacccgcctccaggtaatgaacgccgtgcactccccaacccggggtggcctgctgctggcatctgggggcctcctgctccacggcgcaccaggtgggactggagggtctgggtcaggatttctctgaagctggggcggttcctctgtccccttacgtggctgcactcggggaggcaagcaggcagcccgaggcccagcgcctaccctgtgcagcatcgtggatcagcctcatagctgaggtccctgctacccgggctctcactccagccctgttgcgagggactgttaactgtgcctgttttatagatgaggaatctgaggcttggagagggagctcctggcccagcgtcactcacccggtcagtgggtgattccaggccgtgctacctgaattaccatagccctgtcaggggttttcacatctgttgggaaccttcccctactgctcacagtcacaatagccagtgtgtatgaaactcctgtagtgagccaggcactgggcagggggcacctgcacctgccgaacagagctggcaaggaggaacagccagtgtgatatgcacacagggaaactgaggcttggaggtgagacatcaccattctaggcagtaagtggcagttggcccccagactctctgctctaaacccctccctctgccactgagctcccccgagcttctgtcgccttggctgactgacctcatggagcagtttcttcggaccctgtgctgaggggcttggcacacagtaggtgctaatgcaccagttccctccattcagccagcatgtccagcacctgccaggggccagggctgatgtacaccaccaaatctctgggtgtgcatgcctgtctgtgtgcatgcctgcatgcgtgcatgcgttcgcctgtgtgtgtcgatacctgcccgtgtgcatgcatgtctgcgtgcatcccctgtgtgtggatgtgtcattgtgtgtgcatctgtatgtatgcgtgtctgtgtctatatgtggcagtgttcatggtatctctgtgtccctctatgtgtgtacatgtgtatatatcagtgtgtgcatctacatgtgtacctgtgcatgcaagtggatgtgtacatgagtgtagatacctgtgtgcatgcctgtgtgtgcgtgtctcaatgcttgccagcatctacgtgtgtccatgcatgtccctctgcacatggtgtgtgtgtacacactctgagtatacgatatggaggtgacaccagaggcccatcgtgtgtgaagccagtgatgaattctgttgtgtggccctggggacatgtcttccttctctgggcctctttttcgtcctgtcaagaagggcttaagtcatgctctaagcccatgaccaccccagaaggcccagctggtaattctggggtacacccattgcaggcacctcacccactccaaccctcggtggtgtaggaactggagacacagccttgtcctgaggctgggcctgaggacacaccaaccctgtgtcacctccttttcagcaaatggtggtgggctattgccaatttgtttgcaagtcatttttttgtcatatgcattatgaaaagtttcccagcatccagataagtacagagatttcattacttggacttcacattttgccatgtatgcatgctcttgtttattttcttctgaaatatttaaaagtaaattacagacatcatgatgttttgcctttaaatatgttgttctgggccaggcacagtggctcacgcctgtaatcccagcaatctgggaggccgaggtagaaggatcacttgagctcaggaattcgagaccagtctggccaacatggcaaaaccccatctctacaaaaaatacaaaaaattagccaggtgtggtggtgcatgcctgtagtcccagctactcaggaggctgagatgggaagatcgcttgaacccgggaggtggaggttgcagtgagccaagattgtgccactgcactccagcttgggtgacagagtgagactctgtctcaaaaaaaaataaaaaaataaaaaaacagaatatatatcacagtacaatctaggatcacatattcaatcggattctgccaggctcagtggctaacactgtcatcccagcactttgggaggctgaggcagaaggatcgcttgagcccaggagtttgagatcagactggacaacatagttgccctgtttccaaaaaataggatttaaattggattctgtctttgttatttctcgtagtctggactagcccccctacacctgtttatggagaaaccaggagatgccattgctgtgtgtcccatggtggcgactgggctcattgctgccttgtggtgtattttagcttgttcctctatctggtgaattttcctgcggaaaattctgcagaaaaatctgcggaaccattttttgctggaacgcttgacagctcttgcatacacttgaaaacacgtcacattctaggaaacgtggtgattggtgctcctgtgagctgctggctggcatctgtcagtggtggagagctctggggggtgagggggcacctggttgagccttgtctcctttggcctcccagcctctaggccaggaggatggcaccgagtgtgcctgcagtggcctcttgctgaatggacacttgggtgggtggcttgtgcatttttgtcaggggctgctcagcactcacaccagtccttgggaaggcctgggtttgggggcacctctggggaaggttcctggagcttcctttgctctgtgagaaacctaaggagcctcagagctgcagatgaggaaactgaggctcacatggtgccacctcttgcccgagagggtcagagcaggaggagagcccaggtctggggatagatcttgtgtctccagaggtgccttgtctcaccatctctgctgggctgggaagaggttgagggagcagagaccctggccctgagctgcagaattctcgagtgtcagaggcaccccgagctcctcctttggaagacaggagctggggcatggccaccaccccagcaggtgtgccaggtgggcaggacactcagccgggggcgtccccttcgtttccccagaggatgcggctgtgaaggggcggctggtggaatgtctggagactgtgctcaacaaggcccaggagccccccaaatccaagaaggtgcagcattccaacgccaagaacgccatcctcttcgagaccatcagcctcatcatccactatgacaggtgcccgcctgggcctatcagggcctgatgcctggggccaggaaagaggggcatggaggcccggactcctgagtcctaggcagagggcagggaatcttgacttttaggtagggtaggaggaggatggggctgtgaagtgtcacctgtgaggttggtgctggggcccttcctgggggcagaattgctaggtatctttctctgggctcaaaggcccagttgtctgggtcactggaggtgcagtactgcgatgcaaggccggcaaggttaagacctggatccttgggggctgtgagatgggtcagctggggcccgagtcctccaccttctcctgtcagtttctctcaccatccctctcttgtggcccctgctggcagtgagcccaacctcctggttcgggcctgcaaccagctgggccagttcctgcagcaccgggagaccaacctgcgctacctggccctggagagcatgtgcacgctggccagctccgagttctcccatgaagccgtcaagacgcacattgacaccgtcatcaatgccctcaaggtgtgagcccttggagcccaccccgggcctgccacccccctcagaaagaccagaggctcagaggcccttgggtggccaaccctgtgccaacagggagtctaaaacacacctgggctctgctctccgccctcagacggagcgggacgtcagcgtgcggcagcgggcggctgacctcctctacgccatgtgtgaccggagcaatgccaagcagatcgtgtcggagatgctgcggtacctggagacggcagactacgccatccgcgaggagatcgtgagtgctgtggggtgcgggctggactcttgggtctgaggcaggaggtggctgggggcctggattcctaagtctaagggaggaggggctggggcctggactcctgggtctccagatgggggcagtggtgagcccagatccaggtgagtgaaagcccgacatggcctgcggcacactctctctcacacgccccggcggcaggtcctgaaggtggccatcctggccgagaagtacgccgtggactacagctggtacgtggacaccatcctcaacctcatccgcattgcgggcgactacgtgagtgaggaggtgtggtaccgtgtgctacagatcgtcaccaaccgtgatgacgtccagggctatgccgccaagaccgtctttgaggtcagcatccctgaccctgaccctatgaccccacgacaggacctagaggcagagcaaggatggccggggccgtggcgcctgccagcccgcagccaccctccttctcctgcactgccgtgacctcaaaatggggcctctgcctctctgggccaacccaggggacccagggctatggtctcatgggcctgatgtgaggagtccccagggcatgggcatggggcacccagtgtgcagtcctggcccccggatctcggtagtttccctctgccccaggaaaggggccccacacagtcctgttttttgtttgtttgtttgtttgtttctggagacggagtctcactctgttgcccaggctggagtggggagtgagtgccgtggtgcgatctcggctcactgcaacctcggcctcccagcgtcaagccattctcctgcctcagcc[132 bp omitted]cggcctcccaaagtaccaggattacaggcatgagccactgcttccggcccacagccctgttttacttcctgtgtgagcttgggcccgtcactcaacctttctgtgactcagtttcccacctataaccccacctgcagcagagctttcagtgttccaccagtcagtaggtggctgcacccaccgatcccggagagggcgctcattgttgtcctctccacgcccttccccaccccactcaggcgctccaggcccctgcctgtcacgagaacatggtgaaggttggcggctacatccttggggagtttgggaacctgattgctggggacccccgctccaggtgagggagcctcagcctgcaggggagaacacacatgcttctgaggggtccagggcttgggggatccccaggggtctcagggcaggcagtgatgggctcccatcctctcggcctccaccccaatccacctagcagggtaagaaaggagcttagtcccaggatcgtggacagagtgtgactgcggcccctgtctggtgcctggggagggccactcccctccagcagcttggggtcctgggacgggtccatcctagggaggggcacctctcgagggggtttctgggagagggcagtggaacctggccccgctgacacccactcctgcacacagccccccagtgcagttctccctgctccactccaagttccatctgtgcagcgtggccacgcgggcgctgctgctgtccacctacatcaagttcatcaacctcttccccgagaccaaggccaccatccagggcgtcctgcgggccggctcccagctgcgcaatgctgacgtggagctgcagcagcgagccgtggagtacctcaccctcagctcagtggccagcaccgacgtcctggtcagagccctgtccccccaccccacccctcttgcacacccccttcccgccctcccctcctcctgacccgaactgaccttccccaccccgaccgcgccaggccacggtgctggaggagatgccgcccttccccgagcgcgagtcgtccatcctggccaagctgaaacgcaagaaggggccaggggccggcagcgccctggacgatggccggagggaccccagcagcaacgacatcaacgggggcatggagcccacccccagcactgtggtgagtcccctggggtgggccctgccagggtgcctggggctgggtcctgccgggcgccgcctgtcctcaccgtgacctgcgcttcctacagtcgacgccctcgccctccgccgacctcctggggctgcgggcagcccctcccccggcagcacccccggcttctgcaggagcagggaaccttctggtggacgtcttcgatggcccggccgcccagcccagcctggggcccacccccgaggaggccttcctcaggtagcaccccctgggcccgggccccttctcgcggccacccccagggctgtcccttctcggcctctgtccccgttttccctgagcccctcccccgcccccgactcgctcctctctccatcctgatgccttcgccagccctggctgctgcctcccctgccccagcctccctgctcacgccctccctctgccactctggactccgccgaccctggccacccttcgttgtctcctttcctgtcaccgtttctcagcctgctcttccttttctccttctctccttccctcttccgtccctccctctctgtctctcttctgccctctcgctgcctatgtggaattggctgcctgccacgcctgtcttctcttgtctgctctgggattggatggctcagcgagctggagccgcctgcccccgagagccccatggctttgctggctgacccagctccagctgctgagtaaggggtggcctggggtgggaggtcggtcgggggggcggactcgggtgtccccagggagagttaggggactgggagccctcgtcaacgggttcctgatgagcagcagaggcagggacttggaggaaagggaaacttggtgtctgccgatgcgggggcacgggccagggttctattcccattggaggccactgctggatggatgcgaggttcctcgaggctctgtgaggggtctggatatgtggttctggggttctgtccttagggcttgttctcgcactcaatcgctctgggcctttgcccctccccaccaagttccttcccatctcactctgctccatgcctccagcccaggtcctgaggacatcggccctcccattccggaagccgatgagttgctgaataagtgagtcctgggagtggtgggggaggggaacgggacaggtgcggagcccaggccaggtgcagacaggcacccccgtcatcttgcgccccctgccccctcaggtttgtgtgtaagaacaacggggtcctgttcgagaaccagctgctgcagatcggagtcaagtcagagttccgacagaacctgggtgtgtcccgggggactgtgggaatgggtcggagggagaccttggggaaggggtcagagggactcagatggagctctgcctcccccacctactgcaggccgcatgtatctcttctatggcaacaagacctcggtgcagttccagaatttctcacccactgtggttcacccgggagacctccagactcatatcctctcaggcccggcccagcctcctgcctctccacgtcggccttcctcaccgtggggaagccggctgacccaggtccacacttctcttcagcctctcttgggcacgcaattagttctctgagattgagtgtctgcatctgttaagatgggggtgggattccttcccccaggacaggggatgacagtgaagtggtgtgtgggaggctttacttccagaactccacctgctccaggcctcattttgtccctgtctggcaccttccgtgtcctgccatcgtcctccactgggctccatgtcatgatgccagcaccgcctgcactcaggagccaggcctgcgggtccagacgctgatcaggcctgatctgggctgagtcactttgcctctctgggctctcctgtccccgctgtgaagtgtatgtagaccctcctcttcctcatagggttattgtgaagatcagagtgtctggaaaaccctggaagggcggctggaggtatcagtcccccctgcccgttctctgggcctccattgccacattcatgaaattagaaaagctcgacctgaaaactccttctggccgggcatgggggctcacacctgtaatcccagcactggcaggctgaggccagtggatcatttgaggtcaggagttcaagaccagcctggccaacatggtgaaaccccatctccactaaaaatacaaaaatcagctgggtggtagtggcacgcgactgtaatcccagctactcaggaggctgagacaggagaatcgcttgagcctgggaggtggtggttgtggtgagccgagattgtaccactacactccagtctgggcgacagtctcaaaaaaaagaaaaagaaaagaaaaaattccttcttcggtcgggcacggtggctcacgcctgtaatcctagcactttgagtggccaaggtggttggatcacgaggtcaggagatcgagaccattctggctaacatggtgaaaccccttctctactaaaaatacaaaaaattagccgggcgtggtggtgggcgcctgtagtcccagctactcgggaggctgaggcaggagagtggcgtgaacccaggaggcgaagttgcagtaagccgagattgcgccgctgcactccagcctgggcgacagcgagactccgtctcaggaaaaaaaaaaaaaaaaattccttctttcataatttccagaggctcgtgcaggcagctcagtggaggcagtgacaaaagaacatgagacccaggccttcccagtgggctactgacacggatgcagatgatgataacactaattgctaccatctttgtgtacttaccatgtgccgggcacacagacaagtacttgtgatggattcttttcttttctttttttaaatagagttgaggcctcgctatgttgcccaggctggtctcaaactcctgggctcagtgatcctccccaccttggcctcccaaagtgctggattacaggcgtgagccgccacacccggctggattatttcatcaactcctgaggacattttacacatgtccttgtgttgagacagggcctcactcacccaagctggaatgcagtggcatgaacactgctcactgcagcctcgaacttctgggctcaaggcatcctcctgcctcagcctcccaagtagctgggactacaggtgcacatcaccatgcctggctaatttttttgtagagatggggtcttgccatgttgcccaggcttacacatgtccagaggctaagagaggttaagtggttgcccacagccactcaggtggttaagagctgggattcaaacccaagtcagcctccagagctaatactattatgtctcagtgcggtgtgacattgtggaaggccaaaggaggcacctagggggcgcctcagaggtttccatagtatgaactttgtagttgaaccttgtaggattgagtccaggattgcaccatggggtccctcaaagacctgcaggcgggagctgccgggagctctggggttcctgacccagacctcccgggggcccacctcctctgtctggcttccttgactcctggcgggcacagctggctgtgcagaccaagcgcgtggcggcgcaggtggacggcggcgcgcaggtgcagcaggtgctcaatatcgagtgcctgcgggacttcctgacgcccccgctgctgtccgtgcgcttccggtgagtcaggtacggcgcggccggtgggcggagcctccggggtgaggggcggggcctaatggagcctccctttcacctcatcaggtacggtggcgccccccaggccctcaccctgaagctcccagtgaccatcaacaagttcttccagcccaccgagatggcggcccaggatttcttccagcgctggaagcagctgagcctgtgaggggtggggagggggcggagccaaagccgcgcctctgggtgggcgggtcgggccgtccaggtccctgacttgaaccttcccggtccccagccctcaacaggaggcgcagaaaatcttcaaagccaaccaccccatggacgcagaagttactaaggccaaggtgagagaccgcgggcgtgtttgccggcctatggctgctttgcttctctgagcctctgttttcccatctgtaaagtggggccaattcccatccccaagggttttttgggatctgggatgccactgtgtggtaactaacagctctggcacactctgacggcgccccccctcctcccagcttctggggtttggctctgctctcctggacaatgtggaccccaaccctgagaacttcgtgggggcggggatcatccagactaaagccctgcaggtgggctgtctgcttcggctggagcccaatgcccaggcccaggtgagtgctgctgtgggaggcctgaggccggcaggaaggccgcctgtcatctctgcgtccacccttcctgcctcactgttctttaattcacgtccccactttgaccctcctcctctcacatttctttgtccacttttactcctctttatctatcagtttaatctcctgtctccaacctctggtgttcctctcctcttcctgtccctccctgatttctacctttccatatcctttccacctttctctcatcttttataattttcttcctctctggcgcctctgttgatttcagtcttacatttttctctcctgtgtcttgtatcacctttctggcccctttatccttccttccttctatctcccttgggtcccgacttccctgggctccccatctcctctgagttctgcccccaatgcccccacccagatgtaccggctgaccctgcgcaccagcaaggagcccgtctcccgtcacctgtgtgagctgctggcacagcagttctgagccctggactctgccccgggggatgtggccggcactgggcagccccttggactgaggcagttttggtggatgggggacctccactggtgacagagaagacaccagggtttgggggatgcctgggactttcctccggccttttgtatttttatttttgttcatctgctgctgtttacattctggggggttagggggagtccccctccctccctttcccccccaagcacagaggggagaggggccagggaagtggatgtctcctcccctcccaccccaccctgttgtagcccctcctaccccctccccatccaggggctgtgtattattgtgagcgaataaacagagagacgctaacagccccatgtctgtgtccatcacccactgctaggtagtcaaagaagtggggtgagggcatgcagagtgtgggtggccaggcttcgcagcccatgggtgggactctggggagacagcagcagcagcagccgccgaagccccagctgcaaggccaccagacgcactcctgtgcctggttcctcagtccccaacaccaggtagcaagctctgggcagctgggcctggtagacctcatcttctgtcttctctggtggccctggctctggagaaagaacagggggcactgacatgacaagtagcatgctaacctttgcaagccacaccacatcctgatcccaagttctgaacgcgtggggtctctgaacacaggttttgggagcctcctgccaggggagggcctcggggctctagctggctgtcagcaacttgaagaccacaatgatgtcactcagctcaccctcttcctctttctcagccttggcccccattttcctggagaaactgtgcagctgcaggtgatcctcttagcaatacacatggcgaacacggcagcaacacaggagctcctgtagccttttccaggagcccacccgccccactgtacaaggcgggtggagggaaacaggcaggggccagtgggaggtggagtcgcacagctaagaaggggtgcagcccccgagttggagctcttgaccactgtgctgcattcatccgggcttcactggggtcacagcgccatcccaggtccctttctttgtctttctgggcccttaagggttctacgacaatttttccgttctaacccagaatcttgtgaaatcctcctccataccctcagcctatcagcaaagcctgtgcttttggcagttgtgcagagcgctggactgtgtggatatgggagcaagatcccctgtgttcaaatatggctctgccactcatgagctgagcctcagtttcctcatctgtaatatgggaatgatgaggtaatgggatagtcctcacctgtgaggatgaagtgatttcattctttcattacgtgtaaaggcactgggaagaggtgaggtctcagtgttaactattgttgactatgatccaggagattctgaagccaggcggggacctcccttcccctcccttcccatctgcatcaatgctcagatctcaaggaaaaccactgccctatggcccagtgcatactgggttcctccggatcctccaaccccacctcctactcccattttgtgcgacctgggactcagtgtccccgcctgcgcagtgggagcactgtgccttccgctgacctggtgggaagtgcgtggaggtgaccagggtatagaagtttcggaggaggcgccggcgctgttctggtgaaggctctgctgggaggaaaaggcggtgatgcagagcgcctccccggcccacgcccctcctacccctgcccctgcccctgtcctcagtcacctttatcccccaagggctccacggtgaagaggcagcgcttcagttccaggtggaggagcagcagcctgtgggaaagggaagggaatgtcatggctggggaagaggacatgacccccgacccactccctccatccgagccctacccgaggatgtctgtgtgaagggggaagccactgggcagcgcccggggtcccaacggcagacaggcccgcaacgggtccagcagtggctgccaccagcgctccagaagctgcagggggcgtggtcattgtgaggtcgtcatgggaaggcggggccggcgggggaggtcggggggtgtacaaggataggggcgtggtcaatcgggaggggcggggcctgcaagaagagtggagggcggagggcagaagggactggggaaggggcgaggcctggaagaatagaggcagaggcgggagcggccgatcttggcgggtaggtgaatgactggagcgcagtccagaagaggcggggctggggaaagatgccgctggcagggcagggtggtggggaagggccctcctggtagcgggtgtcctaagagcgaaagcgggacgtggcgcgggttcacctgtggatacaactggctgaggggtgggctcggcccgcagagtagacacagctccaggctcggcagcagagtcagggtcaggagccggtgtgggacctgaagcagggcacaggctggggctcatcgcggcccggcccctttccatcgcagatcccgcctcctcgcgactcggcccccaggtcacatccctccgtcggtgcccgccacccactcaccgtggggctcccgtgcggcaggtacaccgggtagtcgcgagcggtctgcggcggcagggaccccaccagccaggggagcagcacggcctcgggcgtccccagccgccaccaaccctctgttgctgccaccacccggccggacaccaccagactgacgaaggtcgtgcccgcggcctcagcgaacccggagagggcttcctgggtacgggaggcaggaggactgggagtcagcagacaagcgtagggggtggcagcgacttcccagatgggcagggaatggggagaaacccacagccagccccgagctcgcgcagtggccatgctcctacgtctcaccctctctgagcctgagttccttcactttcatacgaagtcacatccccaactcacactgtgaagtctgtgaaatctgattaaacatctagcctgggcgggcaaactgaagctaataatgtaaccgcagcagctaccgttcatccaggcctgttacatgccgagtaggcaccattagcaacgtagagaagccaagtcacctgctgagagtcacatgcctgggaggccgccacaccaggcaagtccacaagagcagtatttaagtagaggtagctagagatctgagaggcaggaggaagaacatgcactgaggttggaaacttgttgggatctcaggactgtgaggtagctgggtggaagtagactgtggatttagcaacaggttagggggtgccaggtgccacaggccttcaaacaccaggctgaggagctgggaccttgtcctgggggaggtggaggctgccggagggctgtgagcaggaaaggggcagagccagctctggatatagtagggttcttctggtggccgggtgtgatggctcacacctgtcatcccagcactatgggaggctgaggcgggaggactgcttgagcccaggagttcgagaccagcccgggcaacttaatggaaacccatccccaaccctagtccatctcttaaaaaaaaaaatagctgaatgtcagccgggcgcggtggctcatgcctgtaatcccagcactttgggaggctgaggcgggtggatcacgaggtcaggcgttcaagaccagcctggccaacatagtgaaaccctgtctctactaaaaatacaaaaaattagctgggccaggcgtggtgaccagcgcttataatcctagctactcgggaggttgaggcaggggaatcgtttgaacccaggaggcagaggt[134 bp omitted]gagatgagaggatcacttgaatccaggagttcaaggctgcagtgagctatgactgagccactgtgctctagcctggatgacagagcaagaccctgtctcagaaaagaaagaaagatggcccaggcgcagtggctcacgcctgtcatcccagcactgtgggaggccaaggcaggtggatcacctgaggtaagaagttcgagaccagcttggccaacatggtgaaaccctgtctctactaaaaatacaaaaaattagccgggcgtagtggtgggcgcctgtaatcccagctgctcgggaagctgaggcaggagaattacttgaacccgggaggcgcaggctgcagtgagccgagatggtgccattgtactccagcctgggcaacaagagtgaaactacgtctcaaataaaaagagagaaagaaaagaaaaaagaaaagaaagagaaagaaaagaaaaaaaaaaaagaaaaaagattcttctgggaccaggtggggataggactggaagctgagaggataggaggaggttgggacaatggtccagaagaaagaggatgaggactgagccagggccagcagaacaggtgtaagagtttccatagcatccccagtacctgcaagagggacccctctggaggaatcacgcagtccacacactgggtcaggtccccgatgagctccgagtcccccaggaagctgtcgatgaggcaataactggcctaggagaggaagaagggaccagcctaggattcaagtgggcccagggtcagacaaccaagaacctgtgggaccaggctgccccaggggctgctgggaactgtagttcccaaatggcagtgcccaggtatcctaacttcccaccctcatgtcctgcaacctcaccctcaagtccttcttcagtctctccacgttgcggatattggtcagttcttcaagtcccacaagaaggacctagaagaatcatataggagaggatgggcgaggggctgggacttgaactcctgggtctgaaggaagagggggctgggactcccacttctgggtctggggactggggagtcaagattcctgggttctggccgggcgcggaggctcatgcctgtaattccagcactttgggaggccaaggtgggtggatcacttgaggtcaggagtttgagaccagcctggccaatatggtgaaaccccgtctctacaaaaaatacaaaaattagctgggcatggtggcacgtgcctgtaatcccagctacttgggaagctgaggcacgagaatcgcttgaacctgggaggcagaggttgcagtgagccgagatcaagccactgcactccagcctgggcaacagagcgagactccgtctcaaaacaaaacaaacaaacaaacaaaagattcctgggttctgaggaaggaagtgttggtggtctgcactcctaggtctgagggaaaaggatgctgagatctcagattcctggtctggggagaaaagaggactggtgagtctcaccatggctccaaacaccatttggagtagtctctccagcctcagctcagagatgcccacctcagatgacagaacaatgagggtgatgctgtggaatggaagtgagaagaatgagtcaaggcctggggaatcaggaaggggtatgttggagtccgcccattgatcctagaacaccagatacatcctctctcagaccaacctgcctttcttatagagaacatcagggatcaaagagggtaactggcttgctaaagatcccatagccaaattaacagctgcttttagagagctggaaggcctccggggtcatcttcaacagggactatcacccaggccctgtccctgtcccacgttccctcctggggacctgtcatggaagcttttccacaccacagtcgtgttctcggtcctcgcagagctcagctgcacctccagattctgcccaaacatgtggactccattgagggaaccgatgacagagaacgggagctaaggaggggttagggacatcagacaagagcacccccccatccccttcccccttaggacccaagtgtgccagctcccagccccatcctctttccatatgacctggcagtgcctctttggggaaccaggcttattggtccattgcctcctcggtcctacaaattcaacactgaaacttccccagcccctactgccttgaagacccagagtcaaaacaccgaacccccttcggtttagatacaggcgtccaaggccccacctgctgacgggcgggggcgccgccgcgactgctcctgcagaatagggggaccccgctggaggccgcgaggcacagcagatgcacagtgccgcccgtcccctcctcccccatttaggactcccaccgcggtccctcacgtggggactgtcagtgcgggtcttggagcatggcggtaatcagagtaactcggcctgtggtccggagccgccagagggcgagatggggagctgattggaagaggattaacttcccgccttcttcacccaactcaaacagaccctcaaaccctattcaggcacctcccccaaacccattaggttctcttccgccctagccggaagtcacggtacccctaacaaagatggcggcaaattgaatttgcaaagctttctagtttctccgaggaggtaaagagaaccaagaagccggattgaagatgatgactgcgccaaggcgttgcctagccaccatcctgtaggctttgatgatttacattctaaacggaaaaaacagctgtgcccggatcaaagattgcgatggtcccaaagcattgcctagcaaccacattccctgtaggtttccagtatatagtagtaaacaatgtgccctactcaaagatggcgaccgtggcggggcgttgccaagcaaccaccattcagcctgatatccattccaaggctgtaaacagctgtgccctgctcaaagatggcggcacgtcgaagtccgagcaccctccttggggcgaaatcgagaaaaacaccatctcccctacaaccttcgagggtggttgagtccagcgatcgttgcctagtaaccactaaaaaaaaggttgtttttgttattagaaaaaagaaaacaaggaaatcctttattttccagaataataaaaataatatcatttctgtaatgaatttatacatgatagcataccatgtaaaatgtgaaaaatcccttccccaatttttttcctaaaatacagtttaacgtagactattcatacgttttcacaaagatgatcaatatactaacatttccacactttcttttttgccatgaaaaagtatgtctatttcatcttaataatgtatttttataatctattttatggatgtgacaaattgatttgaccaattctgtattgatgtacattaggttgttgaactcctccagactagccaactagtgctgggacagcattttactgactttttaaaatgcccttatgaatatttttattattttacacaggcagcatttacttgtaatgacaaaagtatttatgattcatttttcccttcctcttccttcttgcagatcagcccatctttctagcataatttttaattttcctacttcctaaagtacatctttttctcttttttttttttttgggagaggggacagggtctcgttctgtcgcccaaggtggagtgcagtggaaccatctcggctaactgcaacctccgcctccaggattcaagcgattctcctgcctcagcctcctgagtagctgggattacaggtgtgcccccaccacgtccagctaatttttgtagtttttgtggagacagggtgtcgccatgttgcccaagctggtctcaaactctttggctcaaatgatccacccacctcagcctctcaaagtgctgggactacaggcaggagccaccatgcctggcctaggtaccattttaatcttccttcttgcctattgatattttttttcctttctctggattacttttatcttccttacaactttattaaaatgttagttacacaggcataaaagagggggctgctctagatgaaaagaaacttgagacataatgtctaaatatgtgtgtggtctttgtttggatcctgatacaaataaaccaactgtaaaaacacattttgagacaattggaacgtttgattacacacttactgttggatgatactaagaagttaattttgttacaggtaacaatggcatactagtaatgtaagaaagtgttcataaaattggaaagatgcctgccaagcacacaggagtaaaatcatatgattgtatggatttgaaggcttcagcaggccaggcgcggcggcttacgcctgtaatcccagcactttgggaggccaaggtgggcgggtcacctgaggtctggagttcgagaccagcctgaccaacatggagaaaccccggctctactaaaaatacaaaattagctgggcgtggtggcgcatgcctgtaaactcagctactcgggaggctgaggcaggataatcgcttgaacccaggaggtggaggctgccgtgagccgagactgtgccattgcactgcagcctgggcaacaagaacaaaactccatctcaaaaaaaaaaaaaaaaaaaaagcttcagcaaatgagactgtctcaaaaaaaaaagggcttccgcaggctcactgcctataatccgggcactctaggaggccaaaacgggtggatcacctgaggtcaggagtttgagaccagcctggccaacatggtaaaaccctgtctctaacaaaaatacaaaaatttgcctgcgaggtggcacacacctgtagtcccagctactggggaggcagaggcaggagaatcggtggaaccagggaggcagaggctgcagcgagccgacactgcgccactgcactccagtctgggcgacagagcgagattttgtcaaaaaaaaaataataaaataaaaaaaaataaaaataaaaataaaagataaaagaaaaatagaaacccaataaaaaataattttaaatgataaaggtaaaaacctttatcattaggctttctgtaagtacttttcaattggtgattattattattattattacttttttttttttgagacagcgcctcgctccgtcccccaggctggagtgcagtggcgcgatctctgttcactgcaagctccgccttccgggttcacgccattctcctgcctcagcctccggagtagctgggactacaggcgcccgccaccacgccccgctaatttttt[261 bp omitted]tgcctcagcctctcgagttgctgggattacaggtgggcaccacgacgcccagtgatactgacctcgtgatgcgcccgcctctacctcccaaagtgctggaattacaggcatgagccatctcgcccggccgaagattatgttttaaaatatttactggccattcaaaattttgtgtgtgtgtttgtgtgaaactagtcaggtttctttttatttatttatttttattttttttgagacggagtctaactctgccgcccaggctggaatgcagtggcacaatctcagttgactgcaacctccgcctcccgggttcaggagaatctcctgactcagcctcccaagtagctgggattacagacgcccaccaggacggctaatttttttatttttagtagttagaaggagtttcaccatgttggccaggctggtcttgaaccccttacctcgggtgatctgcccgccttggcctcccaaagtgctgggattacaagcgtgagccacggcgtccggccctggtcaggtttctttctattaaaacaaatataaagtggcagggcacgatggctaacacctgggatcgctttagccgaggagtttgagacacgccagagcaacacagtgagaccccatctctacaaaaaatttaaaaattagctggaagtggtagtgcgcggctgtggtcccagctgctccacaggctgaagagtggctccagtgcgagtagaggctgccgtgagccaagattgggccactgcacttcaacctgcacaacagaaagagaccctgcctcaaaaaataaaaattaaaattaaaagataatagtaatgaagtgtttctatttttctatattgttattcatcagtaagatttatttgcgtagtacatttctgtcaacaaacacgctagaaagattttcccagttggccgtatatttttcaacttggtttatacagtcttttgggaaaaattaatgaagactacgttttctaactttgctgtagtgctaagaaactccatggcagtcattaagattttttcccttcagatagttttcgggtttcatttgttgcacttacatttttaatccacctggaatgtatttacgttctaagccagtttctggctcctctcccagaaaacaacgctcaggtgttgcttagcaacccgcacttggtttggtgttcggcttcttttcgggggggaaaacaactgccctcccttccaagttgaggacgaccttaaagcgtcgcctagtaacctcgtttccgccgatgtgattggatccttctcgcgtccctcccctagtccccacgcccgaaagaacagaaccagaaacttaatctaacggttacaaaacaagggcagcgggcccggcgcggtggctcacgcctgtaatctcagcactttgggaagccaaggcgggcgaatcacttgaggtcaggagttcgagaacagcctggcccacagggtgaaactctttctctactaaaaatacaaaaattagcggggcgtggttgcgggcacctgtaatcccagctactcgggaggc[134 bp omitted]aacgaaaacaagggcagcgtacgcgttgcatagcaaccaggtctcctgcccctccctttgagacaagaggcggacctggacgccccgctcaaagatggcggctgactgagccgctttcaatttatttagcttttgacaataattccgtctaacccatcaggcccctagaagggctaactatgccctttctgagtcttccacgcggtgggggcgaaggaggatggagctagaacgaagcctcagcgcgtgccccgcacaaacatggcagcattcccagcagccctaaaccgcccgacgcgagcgcgcgcgcggcgcaggcgcatttctgctcattccgcggcgtcggctgcggctgcagtggtggtggcgggtaccgcacggggtatggtccccgggtccgagggcccggcccgcgccgggagcgtggtggccgacgtggtgtttgtgattgagggtacggccaacctgggaccctacttcgaggggctccgcaagcactacctgctcccggccatcgagtgagtgctgtttccgcgactctaaccccgccctcccacttcagtttcgcacagtttcttgcctgactccgacctttcacttcctaccctcacaggtattttaatggtggtcctcctgctgagacggacttcgggggagacgtgagtctagggactcctgggcctgagggaggaggggccgggggcctggactcctgggtctgagggagggagaaagggctgggcctggactcctgagtttgagggaggaggggctgggggtctggactccttgttctgagggaggagggcctgggggcctggactcctgggtctgagggtggaggcgctggggcccggattcctgggtccgagggaggagggagctaggggcccagatccctgggtctgagggaggaagggctgggcgtctggactgctgggtctgagaaaggaggagctgaggcctggattcctgggtctgagggaggaggtgctggggcctgggctcctgggtctgagggaggaggggccgggggcctggattcctgggtctgagggagaaggggctggggccgagattgctgggtctgaggaaggaggaagctgaggagttcctggttctggaggaacgggaagctgggagccctgattccttctctaagggaaaagggaattgaggtcccagattaaaagttttctgtcctcccctcccagtatggggggacccagtacagcctcgtggtgttcaacacagtggactgcgctcccgagtcctacgtacaatgtcacgctcccaccagcagcgcctatgagtttgtcacctggctcgatggcattaagtgagctttcccccacttggggtgggttgctggtccctgtgaggggccgtgaatgagtgatggcttggggtggttggtgtccccgtgagaggctgtgaataagtgatggcttggggtggttggtgtccccgtgaggggctgtgaataagtaatggcttggggtggttggggtccctgcgaggggccgtgaatgagcgatggcttgggtttgagctgcaggaaacatctcatacattaagggattgaaaggactttgagggtgattgtgtttttgtcagaagtcacttttgtggtggcttctgtgtgctcagcaatgttgccatcagtttagaagtaggaaaaaccttcccattcagggaggcctggctgagctccagcagccaccttgtactccctgtgtgattgtcccctttctgtcctctctttttccgtctacccctgtcctccttttccagatgggtacattgtagcctcagtgcagggggatgggtcagagccaggatagatccctctgtggcttgggtcagaatttttttttttttttttgaaacagtgtcttgctctgtctcccaggcttgtagtgcagtggcacagtcgtggctcactgcaacctgtacctcctgggttgaagcgattcttctgcctcagcctcccaagtagctgggattacaggcacacgccactatgcccagctaatttttttttttttttttgtatttttagtagagacagtttcactgtgttggccaggctggtctcaaactcctgacctcatgtgatctgcctgcctcagcctcccaaagtgctgggattataggggtgagccactgttgcgggattcaggacgacaggagagagccctcgggttaaagcaggagaatctttcattgagtgcactcaggcccaagccgactcacgtccaaagacggcccagaacaaaggtagcacttgacttttatacacacttcacaaaagggggtgggctagcttgaagcaagcttacagtggcgtgacagcagggatacagaggcagaacaaaaacagttaatcaaattgttgtaacaggtttataactcaggattgcacataaccgttgctatgcaacccagatgtcccttatctaggttagcctaggcacgggcttatcccataaccttcactgtggtgcccaggcagctcaggcttctcatgaccttcgctgtacttcttagataaaacagaatacttgaagtcatgagttacagagaacaggaatctataaactcattccataaaacaaaggaaaatttgttttttcttctctctatgttgagggagtgctgggagagtctccaagagcactttagatagtattatcaagacttttcctgggtctgggctgtgcccattgctgcctctcagacaagtcagcctaatacatagaacttatttctctttttaattttttttctttaatttcctgcctcaccaccacgcctggcgctggatcggattttgatagttgacattgtagagtctggagtcaggcagacgggttaaatcctggctcttccagcacagaactaactctcagacccaggagtctgtcccctctgtgcctagtatctcacttgtgaagtggggatgtggatagtacttgtattagtatttcattgtattacttattcttagctgtataatagattaccaccaaataatggctgcatactgcaaacatttattatctaacgcagtttctgtgagtcaaggacacaagagtggcttggctggatggttgggctgagggtctcacaaggcaatagtcaggaggtcggcaggattgcagccatccaggggtttgactggtggtggggaatccgttcccaaggtggcgagtctgtggctgttggccacaagacctctccacagggctggttgactgtctaacatggcaactggcattcctcagattgagggacccaatagagagagcaaagaggaagccccaggcctctcttgtttttgaggaagggtctcactctgtcacgcaggctggagtgcagtggctcagtcacggctcactgcagcctcgacctcctgggctcaagctcaagcgatcctcccatctcagcttcccgagtagctggagtagcagggacggtagccaaa[137 bp omitted]catggtgaaaccctgcctctactaaaaatacaagcaatcatcctgccttgacctccctaagtgctggagtgctgaaattacaggccttagctgggcatggtggcgcatgcctgtaatcccagctcttgggaggctgaggcaggagaattgcttgaacctgggaggtggaggttgcagtgagccgagatcacaccattgcactccagcctgggcaacaagagtgaaattctgtctcaaaaaaaaaaaaaaaaaaaaattttgtagtggcggggcacggtggctcatccctgtaatcccagcactttgggaggccaaggcgggcgaatcacctgaggtcaggagttcgagaccagcctggcc[221 bp omitted]tgaggcaggagaatggcgtgaacccaggaggcggagtt[134 bp omitted]actcaggaggctgaggcaggagaatcacttcaagccaggaggtggagagatcgcaccactgcgctccagcttgggtgactgactgactgagaccctgtctcaaaaaaaaattgttttttttgtggagacaaggtcctgcaatgttgcccaggctggttttgaactcctggtctcaagtgatcctccacttcagtgtccctaagtgctgggattagaggcatgagatgctgcacccagaggccccactaggctcttt[145 bp omitted]ctcccgagttcacgccattctcctgcctcagcctcctgagtagctgggactacaggtgcccgccaccacacccagctaattttttgtatttttagta[156 bp omitted]cccagattggagtgcagtggtgggatcatagcttgctgcagcctcgacctctcgggctcaagtgatcctcccacctcagcctcctgagtacctaggactgcaggtgggcaccaccatgcatggctgatttctttattttaattcttgtagagatgaggtcttgctgtgttgctcagactggtcttgaactcctggcctcaagcgatcctcctgccttgacctccctaagtgctggagtgctgagatcacaggcctgagctgcggtgccaagtccacttctgccatactgcatttggtgtgcagtataagcctatcccgttcagtgtaggaggagactacccagtgtgtaaatagcaagaggctggattgctgggtgctgtattgggggctgggtaccgcaacctcacagcgatgtttggagaattaagttagttgatgatgtttaatacagtgcctggcatgtattaagtgccgtgtaagtgtttcctaggattttgtgcctcactctcctggtttgcaaatggataatggtcgcgtgtatctccgtgttgttagaagatcacaggagctaagttgcttgctgtgtgtcgcttagggcctggtctgcagtcaaggttcattaaacaacacctgttcgtagcggccgttacctctgtatgcttctgcagcaggtgtttgttgagtatctgctttgttccagtatgtgcgtgcaagtgctgggtgcaggacatatagtgaaaaggtgacacagaagcttccccttcgcggtagctggaattcgtaggtaacacagagcagggtttctcatccttggccctagtgacactgtggacacagtcattccttgtagtgggggccgtcctgggtattgtaggatgtttaacatcatccttggcctctactcactagatgccggtagccccctcccaaaggtgtgacaaccaaaaatgtctccaggcattataaaatatcctctgggaagggggcgcaaaatgtattccatttgagaccactgggagagaccggtaagacagtcttgagtgatgttaaatggagacttcttgaggcccaggtccaagtctgatgctcctcaagtgcctggcagccagcacagggcctggtacacaggaggcctcgggtaaattctgtagaatgaatgtccagaatgcatttaatactaaccaccctggaagacactgcatagccttccagacccagctcaggtgtcttataccctgggaaaccttcccgattcttgcagccagatgcttcctcctctgcctccatgacctgtcacagccccacacctctggactgtgaatgtccaggtccctgggtgcttctgccatttgcttccagctggggcttggcacccacggggcttcaggagactggctgaataaatgaattagtatgtaatacaaaaacaacaaataaatagaaaaaattaaccaggcatggtggtgcacacctgtagtcccagctactcaggaggctgaggtaggaggatcaactgagactgggaggcagaggttgcagtgagccgagattgtgccaccgcactccagcctgggtgaaagagcgagaccctgtctcgggaaaaaaaaaaaaaaaaaagaggtggaaggaaaatagacccagtgtgtttcccataacattatgacaactcagttgttcattcatatgttcactcattaattcaacaaatgtttgtggaacaaatcgtcctgggcaccaaggagttagtgggcatgagataggcaaggtcctggccctcatggaactagtttgcctgggtgacaggccgtgtgtagggagcccttggtcatggccggatgctgttaacattcactcattttgacctcctggggctccaggcacctgttagccgatgaaagcgggcagcagagaccccggggaatgatactgggtagaacaaatgggagtaagttagaggacttgggaacaccaagtcagagcccacttgtgtcacctagggggcttttatttttattttgtgtctgccatatcaaggggtttatttggaatttatcataaacttgatattttagccatattttgcagccagccatagtgcttcttctgttcaagttttccacatttctttgacaaaatgtttattacatgtcgccctttgagcttgtagcacatgacttgtacttagtgttcaataagagaaacgcaagttttagcatctcaaactggttagtttatcacacttttcctcataagggttttgttttgttttgttttgtttgagatggagtctctctctctctcccaggctggagtgcagtggcatgatctcagctcactacaacctctgcccccgaggttcaagtgattctcctgcctcagcctcccgagtagctgggattacacgtacccaccaccatgtctggctggtttttgtatttttagtagagatagggtt[132 bp omitted]taattccagcactttgggagggtgaggaggcggatcacctgaggtcgggagttcgagaccagcccgaccaacatggagaaaccctgtctctactaaaaatacaaaattagctgggcgtggtgccgcatgcctgtaatcccagctactcgggaggctgaggcaggagaatcacttgaacccagaagtcgaaggtagtggtgagctgagatcgtgccattgcactccagcctgggcaacaagagcgaaactccatctcaaaaaaaaaaatttatcaccccaaagaggacaccccatatgcatgaagcactagctccccattcccccatccccccatccccagccagggtggttttggctcgagtcccagaaaggcccaggaaaatattggcttaatttcacctgtagcagaacagctgggtccagagttggttcaccccaactctt[152 bp omitted]ctacttaaaaattaaaaaaattagccgggcgtggtggcgggcacctgtggtcccagctacgagggaggctgaggcaggagaatggcgtgaatccgggaggcggagcttgcagtgagcggagatgtgcctctgccctccagcctgggagacagagcgagactccgtctcaaaaacaaaagctgttttgatggctaggaagaggagggctgggaagtgtgtggtgggttgggagcagcgcccgagtgccctgagagcaggaagaaggctcaggggctcagtgtgctcactggccgggccgagtgggactggaaggaaatcagtgcgagaactcaggcaggaagcggagagccccgctgcatggccctgccaggccaccagtgcactgagtactcagcagatggttcctaggccttgtgtgacctagggtcagacgccttggtgtctctcttggagggctgcacagggtgcggagagaagcttgacagctgcagtatcgggtgatctatgatgtgactaagggcaggccgtaaaattaggtggcatgtagggaaggcttcctataggagggcacaccaggatgggtgtcgtagtttagctggattccatccgggccggaatgggtgtgttccagcacatgcagagacctggatgtctgggctttgtcagttgagaggacctataggtgcgggcatggagcaggagagatggacggggtgcaggactcggaggcctcggatgctgggccgatgccgggccgagggcctgggttggttccagtcttgatggacacggttgggcctgtagacgttcattcacttagcctacatttcctgaggcctcacatgtgccccgctgtggtgggcaagcctgggggtaagagaggactcagaccccatccccgcctgtgggagaggtaggatcagagaccacacttcagggggacagggccctcaagaccctcagaggggtgctcggtctccacacacgtcccctgcagcaaaggtcagcctctcacgaccacgtgaccggaataatggtggcaaccacagctgcccttgaggagaggccatccccgggccacaacccatgtgggacggatgctgcgacgcgactgcagatcaggcggaggagaaacgagagtctgtgtgtgttagtttcccaggctgccgtagcaaagtatgagaaactggccagaagaatggaaattgatgtctcagggttctggaggctggaagtccaaaatccaggtggtagggccaggctgtctctgaaatcttacaggggaagggcccttctgcctttcctggtgcctgctgaggctgcatcacccgtcctcacatggcctctccctgtgtctctctgtgtccttgtgtcttccctctgtgtgtgtgtccgtgtccacgtttctccttttcacagacaccagccatagtggattagggcccgcaatttaactcgattacctgtgtaaagatctttccaaattaggtcaccttctgaggtactggggcttaggacctcaacctgtctttttgaagggggcacacttgaacccataagactaggaggacagaggaggcccccgtctctggctgggaaggtgaagtggggccaggactgatttggagcagacagcccagagaggggaggggacagcaggaggctgggcatggagtcagtcactccagggttggagtcagcacaggatcctaggcttggggtccccagccctttcccattccctcccagtcctcatgattaaagacaacaaatgtcggccgggtgtggtggctcactcctgcaatcccagcactttgggaggctgaggcaagtggatcatgaggtcaggagatggagaccatcctggctaacatggtgaaatcccgtctctactaaaaatacaaaaaattagccaggtgtggtggcaggcacctgtagtcccagctactcgggagactgaggcaggagaatggcatgaacccaggaagcggagcttgcagtgaactgagatcatgccactgcattccagcctgggcgacagagcgagactccatctcaaaaaaaaaaaaaaacacagacagcaaatgtcccctgtcctgtctgggactggtgctgtgctagcaccagggattgggtagggaactcagcagggtccccgtcatcccaaggtgcatagcccaggatagagtgggggacagcatgggagcaggctcttcaagcatagcctggggatggggatgatggcaaccctgggggctgaccgctctgcccctgcaggttcatgggcgggggtggtgagagctgcagcctcatcgcggaaggactcagcacagccttgcagctgtttgatgacttcaagaagatgcgcgagcagatgtgagtgccccctccacccaggccgggccggtctctctctgcctggcctggaaccactttgcctgtcgagtggttctacctccagcctcaccctgtagggcatgggctctgtgtccccaagcacgctgagccaggaggctgcaggtgtgtccttgggggacgcctggccagtgcccggtctcagcatccccatcaggaagcagtgccaactctgggtgtcactcctgcctgccctgcctgctgggtgacgtagagcacatcccagaacctcttggagcctcagtgttctcagctgtaaagtaggggcgttgcttctgattccatgtgaggcggaatatgtgcatctccgctggtgctgggtctgggttccttctcagggcctctgttgctgctggctccatgtcttctctctttcctggtagtggccagacgcaccgggtctgcctcctcatctgcaactcacccccatacttgttgcctgctgttgagagcaccacgtactctggatgcacaactgagaatcttgtgcagcagattggggaggtgaggactccagggtctgagggacgagggtctgggggcccggagtcttgggtctgaggcaggaggcactgagggcctggactcctgggtctgagggaggaggcactgggggcctggactcttgggtctaagcggggaggcactgggggcctggactcagacacagaatagtcacagactggtgaccagctttgcttactctcttttcgaaacagtctggctctgttacccaggctggagtgcagtggtgtgatcttggcccactgcagcctctgcctccagggttcaagcaattctcatgtttcagcctcccgagtagctgggattatagacgcccgccaccacgcccagctgatttttgtatctttagtagagatgaggtttcaccatgttggccagactgctctcaaactcctggcctcatgtgatctgcctgactcggtctcacaaaatcctgggattacagacgtgagcctccacacctggcccacttagtcttactgacaaaactagaacccagagtctcccggggcaggtgatacctggtttcagggtctcctgcctcaaagcccaatgggaattgtggttgtagggctggtgccgtccagccacacagcagttgtggtaggttgggggccggccccaacacccttatggagggggcccgtcatgactgctcggcccctctcctacagcgggggatccacttctccattgtgtctccccggaagctgcctgcgcttcggcttctgtttgagaaggcagcccccccggccttgctggagccgctgcagcctccgacagatgtgagccaggacccgaggcacatggtgctggttcggggactcgtgctgcctggtgaggcctgggcaccgtgcgcggggatgggggctcgacgtgtttccccagctccctctgacttggattttggatttctctcctttctctgcatcttgaatcccttctctctggggttggccatccctcctgctctcagttgggggtggctcagccccaggccccctccagtcaaagcagccagtccccctgcctcccgccgcaccctcaggtgccactctctcagcagccccccagcagcctctgccccccgtccccccgcagtaccaggtatggatatttccgggaagggacatgcttctggggacttgctggagccctggcccctggggagaaatctagttgcatgttggagcttgtgggatgatgggagtcccatgggacattgggaaggtgggactcttggggccatggaagctcatgtgctgtgtgatgggtgttgtgagctaagctatcccagctggtgcctcatggggccatgggtggtgtgacctcgtgggataccaggactggggggccatggtcctcaccagtcccttcccttcttcccttctacccacaggttcccgggaacctgagtgcagctcaggtggccgcgcagaatgcagtggaggctgccaagaaccagaaggctgggctgggccctcgctgtgagtcctggagtgaggatgaagggcgggcaggggccaggcaggcctctctccacacacttgttccccacttcttcccttggtctctcccacagtctcgcccatcacccctctccaacaagctgctcccggagtgggtccccccttcagccaggccccagctccccaactacccccaggaccccctggcgcccccaagccaccacctgcttcccagcccagtctggtctccactgtggcccctggctccggcctggctcccacggcacagcccggggcaccgtccatggtaggtgcctgcacgcctcctgcccctgctccttcctcctgctgtccacagctaggacagttagaggatgagtcatttgccttccagggggatgtggctctcgtggttctggggctttgggggctcgtggtgtgtgtgctgcagatgcctgagatgagggtctggggacagagtggggaggctcatggctccaggagggtcagggctgttccgagaaacccaaggaatccctgggtctgggagtccagggcatcgcacagcttacgagtcctcgaatcctgcaaggtccaagcatttggggtcctgcggctggccaagtgctgttctggggatggaggggcagaagaagggatctttcctccttcctggtttgccctcacaggatggcccccggaggctcccggccttccccattctcatggccctccttcctcccctctggcaggcaggcactgtggccccaggaggggtgagcggcccttccccagcccagctgggagccccagccctcggtgggcagcagtcagtctccaataagcttctggcctggagcggggtcctggagtggcaagaggtgaggggcctgagggtccattgggcacttgggactcctggggccgtggggctgggcatgtaggactcatggggccagatgcgtggggtctgcagtgctgggtttggaggcattcgttgcgctggacctgtgggatgcggggcgaggccaggagccccatggagtggtgggacttgcggtacagaggagagtccccatgcaaagaacccagaaaagcccaggatttggggcccagagaagagcccaggcgatgtatcatctggggcacagtggatggtgggatttaggggccgggcacgtagctgtaacatttgaggaactgaaggcttgctggtctggaggaggggcctggggctcatgggacttaaactggggaacatcctgagctttggggctaccagggtaggacatgagggctcaaggggactgaggcttatggccctttttactgacatgctcttttttccccctcagaaacccaaacctgcctcagtggatgccaacaccaagctgacgcggtcactgccctgccaggtctacgtgaatcatggcgagaacctgtaggtgacagtcaggggcggggtgtggtggggctggggctggccccctcctcacacctctcctggcatcgcccccaggaagacggagcagtggccccagaagctgatcatgcagctcatcccccagcagctgctggtgagtggcggtggagggccagccctgctgccgggcagtcctcaccctgctgtctctttcctgttccctgccccacccccactccctgcctcatgtccccgcctcacttgcccacaccagcatgccagccgacttctgtgtctcccgcagaccaccctgggccctttgttccggaactcaaggatggtccagttccatttcaccaacaaggacctggagtctctcaaaggcctctaccgcatcatgggcaacggcttcgtgagtccagggcatggggggccgaggggtgttgactcttgtcctgctttctgctgacctttgacgggaatcccagagtgcctgggcccacggaagccgtttttgatggttgggtgcacttcatgcccttaggttcctcgcctttcttctagagccgtgacttttattataatcatcgtatgcaccagatttgagggatattccacattaaaaatgtgagctggatgtgacaggatcagttaggaggaagctgttgattctggcatggctttatgggatgtgttcatttcctgtggctgtggtaacacattaccacaagcagaggggcttaaaacaacagaaacgtgttctatcccagttctggaggccagaagcccaaggtcagggtgtcagcagggccacgctctctctagaggctggagggaaggcctcttcgttgcctcttccggccggtaaccccaggcttcaggtggcatcgctccagggtcttcctccatcccgcagctgtcttccctctgtgtgtgtctccacatggcattctctctgtatctttgtgtctgtgcttataaggacatcagtaattttggattaggccccattttcctgacctcatcttactacaattgcaaagaccctctttccagatagagtcaccttcacaggtgctggggactggaacctcagcttagctttctggttttgttttttgagacagagtttcactgttgtcagccaggctggagtgcagtggtgcaatcttggctcacagcaacttccgtctcctgggttcaagcgattctcctgcctcagcctcccaagtagctgggattacaggcatgtgccactatgcccagctaatttctgtattttttagtagagacagggtttcaccatgttggccaggttggtctcgaacttctgacctcaagtgatctgcctgcctcggcctcccaaagtgctaggattaccggtgtgagccaccgcgcccagcctcagcatagctttctgggagtcacagttcacactttgtaactcggggaaggagcagatcagttacttccgtgcaccaggcactcctgcaggaaagagaaccttagggggatcacctcacgagaccctcacagaaccttgtgaagaaggcattcctgagagttagtacttccggctgcaaatcacgtagtttcccaaacacatagataattgggggcactcggaaaaaatgttctcttatgattctgtgggtcacctgggctcagtgggccatctcgcttggcgactctcacggggttgccatcagatggcagctgagactctggtcatctgaaacctttactgggctggatgttcaaaacagctcctcacacagccctggctgttggctggggcttggctaggaccggccatcccagtgtctgcacatggcctgtccacgtggccacactgtggcagctgggttctgagagggcaggcgttgtaggagcaggcatttatattttgcacaggacaggacatctagagggggccagctattgggattggtttcataggtctgtgacatcagggacagggccctgtggttctcttggcctctcctttatagtcacaaggtagctctcatggctccacgcatcctgtgtgctttcatgaaggaggggaagggggctgtgtgtttccctttcttcaagacagcagaaactttctcagattccagagcaggcattcctttcacctcctatcccggacctaggccactgggcagcccctagttgatgggaggctgctgggagcaggtatccgtgactgtctggggctgggacatgttacagccccagacagcattgggaatgcaggggaggaggacacttggatatggaataggcagctagcagggtctgtctcaggcaggaaaccgaggctcagagaagtcaattcacttggccaaggtcagcctcgcctccctcaggagcccctgccctgaatgctccatgtgttacccccctgatgaccagtgatgtttcctgggtgcttcctgtgggctgagcctcaggcagggctcttgctgtggatcagacatcgcatagtcacagcgaccctgtgatgtgggagcactccccgtggtgtacactggccggtgctgagggctggaggatctcttggatacccggggtccgacccaccgttgatcacaggcctgtgggtaccacgctgtgcatctaggccgctctcccggccgtgaccctcagccgccctctgaggaggccgccgtggcattttatgcccaagaaactgggtccatgaggagcaggtggtggctgaaggttgaagagctgggctccagcactttctctccgctttccctctcagtgggcagctggaaccctagcttgccctgagcgcctcagtttctgtctccagagcaacccatagcacacctgttctccttaaccttctatagcagaaacctcacctcaccttgcctgtggggcctctagagccttctggaatggggagggggtcagggctgcctctttcagggcctgaatggttctgaagagctgttgtccacccaggcgggctgcgtgcacttcccccacacggcgccctgtgaggtgcgcgtgctcatgctcctgtactcgtccaagaagaagatcttcatgggcctcatcccctacgaccagagcggcttcgtcaacggcatccggcaggtcatcaccaaccacaagcaggtccagcagcagaagctggagcagcagcagcgaggagtgagtgttgacagtccccaaaccagcactccgaccccctcctgcccgggccccacatggccccctggggtctccaggaccaagatgcccacccttctcccaatatgtggtgcctccaagctaagtcccactcagattttcttgcagtctctctcctttttcagcatccacatcaaagccctgacacagcttcctcctggagaccttggagtgtacggcatccctcccagaccactcacccccaaagagaatgtccccatctccttactagttcccctcagggcacaggccctcccgcctcagattcaggatgccaccaccctcagttactgacctgcccctctctccccgtgcagatggggggacagcaggcacccccagggctggggcccattctggaggaccaagccaggccctcacagaatctggtgaggacagggctggcggggtcggggctgggttggggaggccccaaggctgcgctctgtgcctgcagaaggggcgtgaggccctgcccatctccctcacccctgtgtctcttcccaccagctccagctccgcccaccgcagccccagcctcagggtaccgtaggggcctctggggccacggggcagccccagccccaaggtactgcccagcccccgccaggtgcccctcaaggccctcctggagcagcttctggcccaccccctcctggacccatccttcggccccagaaccctggggccaaccctcagctgcgaagcctcctcctcaacccaccaccggtgagatgttggggtggggtagcgagagttccagatcctggccctggtggttctggtcctgttgtctgggaggagggaggttgactgtggtcagtgggtgtgaatggggacccgcccagggctttaggcagaaggcagaccgcctcctctccgtccatcccccacctttgaagaaaaacttcccctcaccactagctgattccatctctgagcagtgtctgtgttgagaggtggggagtctctaccaggagcctctgagccactctctgtgttctcccagccgcagactggggtgcccccaccccaggcctccctccaccacctccagccaccaggggctcctgcgctgctgcctccgccgcaccagggcctggggcagccccagttggggcccccactcctgcatccaccacctgcccagtcctggcccgcacaacttccccctcgggctccactgccaggtaaggggacccgggggagggcagaggtctggactgagtgtcccagcagctcctgggctagagcaccaagaccgagtgctcctgggaagtaaagacataggatccaagaatgagggttcccccatggcctttgcggagctctgagggctccgggaaagtacagcccatgggtccaaggacctagtgggttaagagcgtttcccatgatcctcctgtgtgtgctcctgggattgctgggaaatgtggtcttagggccagagaagtagttttggagaagggcccccaaaggctcatgggaaacagcatatttgtaactagatggggccagaaggtgcttctgttgggtcccccaagggctgcctagaaaacttagtgcctctgggccctcctgggcccaagggcctactgggagatgcagtcccttccccactgcccctcaggtcagatgctgctgagcgggggtccccggggcccggtcccccagccgggcctgcagcccagcgtcatggaggacgacatcctcatggatctcatctgaatccccaacacccaataaagttcctttttaacacacgccccggctcccgtcactgacatccctcaggactgggcaggaggaaaccccagggggcatctctgtccttgttctcacttcagcagacatccctggggccctgggtgaatgacgctggggcctccgtggtgagtcacaggcagtctggtgcaacctgattcgtgggagatgcagggacaggcaggcagcgctcaggactcaagctctcatggaggtggcaggggcaccatgggagcctggaagaggcatctgacccagccccagctcctcagagtcttgaaagagaatcagccgtcaggctgggagggaaggaggtgaggggtgatctgggtgcagaggacaacagaaactttgaatactcaaaggcaggaggaagcctgagacattgagaggagcaagttgatggatgcttttggagcatgagcatgtagggagctagagagatgggcaggtgcagagtttgaggagctcggattccaaactgagcagcccatggtttgtcctggggacacaggagaaccaggaggctttgagcagtggggcgggcctaggccagctctggatgtcagaaagacccctctcagctgtagagcgtgatgaggccagacaggaggccaggaaaggtgaggctgggtggtggcggtgtcgggggctggggtagaggttcgctcccgggggccaggcctacgtgatggtaggtggtggggctcctgggagaaggagctggtagtaagtgcaggtggtccaagggacatccaggtgacaggtgccatgttgggagctcaggacgtgtccttaggggacagtgtatgtttggcagttcaagccacagaagcagacaagatcgcacatggagagagggcagtccctgggtccatgtcagagactgaccttccagggctgtggatggggaagacggtgggtctgtccccaggatagaatacccagcagggaacaggtttgggacgtggcaaggtgagggacctgaaggatgtcctcagagacgtcccgagggcagggggatccagacaggcttggagcgcagggtggtctctcctggaggtggtgagtgagttgtctgttgttggactctggaccagtgttgctgagagcgcggtccatgcctggaccaccagcatccacatcattttgcatgctggttaacgtacagattcacgggccccaccccaggagagagattgcaatctggtggcctatgggccatcgtgcggatgagttttgtttggccttccctgtgttagcatatgtggcatttttttcttacgagttagttgtaaaaatcaggttaattcacacacacacacgcacacacacaaaatctgcagtcttggcttcttttgacaagtcagaagaattggcacccctgggcccgcccttctgcctggcaacaatgggctggagctgcccctctccatggggcgtgtgctttctggttcgccacagtccccaccactccctcttggcttccctgtgaggcagagagtcactgcctttgtcacggggtttgcactgtggttgttctgtggtagcattcagaggaaagtgaaatctttcttgtacccatgtctctatcacaagcggcaaaacgaaagagagaaggagagggccgtgtgtttcgagaaaaatgggagcgagcctatttctttgtggaagtgaagagcatgcctatgtgtttaatatgcaaacaaatcgtgtctgtgttgaaagaatacaacctgaaacgccactatgaatcaaagcatagtaagagctacgaccagtacacagaacagactcgagatgccatcctcaacgaactgaaaaagggactcaaatgtcaatagggtttgttttgaaaagcgaattaacagaagtggcgcggcagtggtacgccgttccggaatcacgtgagaagaatgacctgggcattcagagctacagcagatggcaagtttataaaggagcagagtgacgtgtcctgcacagaaacacatgactgttgagaccgttatttaagtctaacgggcatttgcgttgcacagtgagttggagataactcgggggatttacaagtccagttgcttgaaagagtcaaattgattgtggccttttctttcgctgctcataaactattaccacccagttagctttatttatttgtggtgttaagaatcttgatgtgaccgaagaagtctgtggcatggtgccaaggcaggcccaacactgggaaaggactaattttttttgtatattgagagaaaagtttcacatagactggccagagttccgaagcacaactacagacagcgtcatgacagggggacttggcaggacaccttgatccaaggcgacagcatttggcaaggacacggaagttgggtcgttgcatccatcatcaggagttgacttgttctgagcaactgaacagaacacaccgcgatgctctcgacacttccgctcctggacttcagtcacgagtgagttgatggtgacttgacctgagagatttcacagaagctctgtgacttggttgtggaagaaatctgaactgttcaagttaaccaacttggttcattttaaatcaggcaaaagccacagtgggttcccctgagaaggttagtcaaagacttctggtcaaggttatgaccgttctgaacactgaatatttctccgcaaggatgtccacaaacagctacttgaatgtatgatggtgtatgcttggtcctggggaatccaccggcaaggaaaaaaaacctttactctttcctgtgctgcagtcggctttcagaaatgaaagaggtggcccggactgtattcacctacgtcctggggttgaagaccaaattcccccaaaggctctcggaatccagactcatgagaaggaacagacattgtccagtttgcctttgttggcagatgtttcttgtgtgaatgcagaccataaatagtaattgaactacagtgcaatacggcgctggttcctaaatacaagtctgtgtgaagatggtgagattctacaactatctccagtagttgtcctgaatatctgtgtttgggagtacccacgcttgtgaacagctgttttccgttacgaacctgaatcaaattaaacatcgttcccagttgaaggattcaaggctgaattctaaactgcccgtccccaccgtgccacccgaggcctgacactgacatctcggtgtggaagggaagacgccagccttttggcttcaactcaaaggcgcaaaaagaattatgaaagagaaaattttaataattaaatatttctatttttcaatttgtattttttcaattttgaatttaaaaatataaactccagtaacatccatgtttgtattatgttccatgcattcaccatagttgagtaaagatccgatttgatgatatttctggccgtcgacttttcttatacctggctagttcactcatttatgtgacccgcctggcccctgtaggcatgtgagtttccgatccctgccctggaactgttggatccagtggggggagggcgggggtctgggagtcgtgtgagcaagctctctaggcgatcctcaggaatgtgagtgtggagcaggaggcactggtgacagcgaagaagtgcaagtgggtgatttcccaggcagcctgtgtagcaggggtttttgaaaactcagatggcttcagggaccaggcaggtgatgaaaatgtgtgaagcggacgggtgtaagacaacagggaatgatggggactgtggcgaacttggagagtgcttgccccgcctaatggcattcaaattgaaaacaaaaacactgtgaggaccaaacaaaatctgcctgtgggtctaatgaggccgccaggccgccattttgcgactggaagaaggagaagactcgagaacaaggacagaaccctgagaaagagccacgcgtaagggttgggcagggagccagaagacaggagaaccaggcaagtgtggcgttctggaagctgagtgtttgaggagggagcaatcgactctgtcagaagccgctgagaggagcaggaagcagccttcagtgtttccaccagggtggccatgtcccccggcaagggaaacgcaggtttggatcagaaacaaattggttaaaaggaaaggtttccagtcgccagtttggccatctcatgccagtggcgccctcttgaccttaacactcaaattagaggaaccagagggactgtcgtggcctaatcacacggtttacaggagtgaaccggggcttgcttattaatagtagcagacctgttaggggtgaaagaaaatgcccacccaccagctccaaagaggaattaggagaaaaaggacacctcaaaaggggtgttaagaatgtatttgtttcaaggtacgcaaaacactaacatattttctcaccatcttggcatttaaaaaaaaattaacttttaaaatgtattaagttacacacactagaacagtttcctaa[139 bp omitted]tatggtgaaactctgtctttactaaaaatacaaaattagctggccatggtggcacatgcctgtaatcccagctacttgggaggctgaggcaggagaatcacttgaactcgggaggcaaaggttgcagtgagccgagattgcgccattacactccatcctgggcaataagagcaaacctccatctcaaaaaaaaaaaaacccacaaaaaaaaaaccaaaaaggaggcccaaggaatgaggccagatctaggcacatgggactcacctccccatttcataggtcaggtgacgataaggcctaagaacttcacatgccccttagaaccagccaacaccaacagagcaaatcttttgggaaagtttttccctgaatacaaggttctcctaaggcaagaaatagtgaaaaccctagaacagcagggtttaatcccaagattctgcgctgattagctctgtgacctcgggcaggtccctgcatgtctctgagcctcactttctccatatgtcaaatagtgactaccccagaggattctcataaggaatacaagatctggcccagctcagtcctggacacaggagagctgctggtagccactgttgtcatcttttggctgaaatgcactctaagaaggtaaaaggtgggcaaaactgcttctagaaatgcatgccaagctggacctcacgcctgtgatcccagcactttgggaagccgaggtaggagaatcgctttgaggccagggtttcaggaccagcctggcc[131 bp omitted]ggccaacacggtgaaagcctgtctctagtaaaaatacaaaacttagttgtggttacgcacacctgtaatcccagttacttgggaggctgaggcataagaatcgcttgaaccccggaggtggaagttgcagtgagccaagatcgtgccaccgcactctagtctgggtgacagagcaagactctgtctcaaaaaaaaaaagcatcctaacttacaaaaatcacttgtgtccagaaaggttataattgagtgagtgacttgttggaaacattttctttttgaccagtttgcttttgaatcatgcatcatgactggaggcaagactggggattcatgaaaattcttgcaaaggagcaggtggtaggacgtaattggaaaaaagtgattgttgaggcaaaaatgctaaaacaccaacatattaatagttggaaacctgttcggggtgaaagaaaatgcccacccacctccaaaggattatgagaaaaaggacaccttctcaaaaggggtgttaagaatatatttgtttcaaggtacacaaaacactaacatgtattttcttaccatcttggcatttaaaaaaaattaacttttaaaatatattgagttacacacactacaacagtttcccaaaat[132 bp omitted]gccaacagggtgaaaccccatctctactaaaaatacaaaaattagccagcatggtggcatgtgcctgtgatcccagctacccagaaggctgaggcacgagaatcactagaacccaggaggcagaggctgcagtgagcagagattgtgccactgactccagcctgggagacagaccaagactctgtctcaaaaacaacaacaaaaagtggaactaccctatcacacctcactctcgcctctcctgcccaaacacacaccctgagcaaaccacttacctccctagaggctgatgtaccagttctgcatttgggtttacatgcatgcggttgtggatatatttatagtttaatttttttgtataagtgagtcaatttctttgttctttagcttgcttttttttttcttccaaccaaagtaatggccattatttatttatttatttatagacagagtctcactccgttgcccaggctggagtgcagtggcgtgatctcagctcgctgcaacctctgcctcccaggttcaagctattctcagcctcccaagtagctgggattacaggcaggagccaccatgcctggctaatttttcgggttttttttttttttttttttttgagacggagtctcactctgttgcccaggctggaatgcagtggcgcagtctcgactcactgcaacctccacttcccaggttcaagcgattctcctgcgtcacccttccgagtagctgggattacaggcgcccaccaccatgcccagctgatttttgtatttttagtagagatggggtttcaccatgttggccaggctggtttcaaactcctgacctcaggtgatctgcccacctcagcctcccaaaatgctgggattacaggtgtgagccaccgacctggcctgcctgcactgttaattacctgttcctctatgtccccacttctcatggtggcctcaggtagtgcactaaatggacgcatttcagttccacgagccatcctgcctataagttatctgttgtgtaacaaaccccaccaccgagtggcttaaaacaagaagcatttattgcctcaccgttgctgggggtcaagaatccaggcttggctgagctgctggctcccaggctctcggggttgcggtcgagctggtggctggggctgtgcagtcatcggaaggctccgtgaggagggcccacttccagcccactcacatgcctgttggcaggattcagttcctcacaggtgatggggccgagagcctcagttcctagctgttggctggaggtctcccttgttttctcgccgttgcaggcctcttcacagggcaccttgcagttgcaatgtggcatccagcttctctagaaatatgagaagggctgggtgcggtggctcatgcctgtaatcccagcacttttgggaggtcaaggcgggtggatcacctgaggtcaggagtttgagaccagcctggccaacatggtgaaaccctgtctctactaaaaatacaaaatattagctgggcgtggtggcaggcatctgggaaatcccagctactcggaatgctgaggcaggagaatcgcttgaacccaggaggtggaggttgcagtgagccaagaacacaccattgcacaccagtctgggctgcaagagtgaaactgtctcaaaaaaaaagaaaaacagaaatgagagaggacgcccaaggtggaagctgcagtcttttgtaacccaatcttggaagtgatatcttgtcactcttgctatattctgtacattacaacaagttgctaggttctgcccacactcaagctgagaggacagtgcagacaggaggtgagggtcatgggggctgtctttcagggtgcccaccacactgcaccctgccagttgagggcctgtccagtttttcttttatttcttctttttttttttgagatggagtctcgctctattgcccaggctggagtgcactggtgtgatctcagctcactgcagcctccgcctcccgagtagctgggattacaggcacataccaccacacccagctaatatttgtatttttagtagagatgggattttgccatgtt[135 bp omitted]tgtatttttttaacccacttgtgcaggcattcctatgggatgcattcccagcagcagaatttcaaaactaagtatgccaactttatttacatgacccaaaaaatgttgtattcatgtttcgcatatacgagaaaccttcctatggttcacacttggaggggctccagaaaccaaccaatgcagtctctctcagctccctctagagatcagttaccaattgcttaagtgtcttttcagagagacgtataagcaggtacaagcaaatagagaaactgattgattttctggcttttctatccagtggcaatctcctttattctatcatttttttgtttgtttttcaatctaacaacatatcttgaagtttggacaaaaagccttcattttatttatttttaaaaatagcccagggggctgggcacagtggctcctgcctgtaatctcaaacccaggacgctgggtttggggatagggcagatgtatgtcttttacaatctgggaacactcagcatggtctgtgctggagggcagatggtggcagagaggctgagaagcgcggcagtgacgagggtaagacggtcccaagcccgaggggcttggccccttgtttattccacaaagtggaggccaacacctactgagattaagaacctgggccctgtccctgtcccgtgtctccgcagcctgtgacgtcaggcttttgcttccagatccttggtttccccatctgtggagtggggattaaaagattgttgaactcatggcctgctgtgtgagaattcagtgagttcagacatgaagttcttgagaaatattaactactattattgccaggggtctcactctgtcaaccctggagtgcagtggcatgaccttggttcactgcagcctctgcctagaggggtcaagcagtcttcccacctccacttgtcgagtagctgggactacagacacgcaccaccatgcccagctaatttttgtattttttgtagagacagagttttactctgttgctcaggctggtctcgaactcctggcctcaagtaattctcctacctcagcctccagagtagctgggactagagacatgtaacaccacgcctggctagttttatagttgtagagatggggtcttgctatgttgcccaggctggtctcaaactcctgggctcaagcaatgctccaacctcagcctcccaaagtgttgaaactacaggtgtgagcctctgcgtctggacacacacgatgatgacaaagttgaaatacctagagtttgcaaagcatgtatcaggcagacctttaaaaaaaaaatcagccataaactattttgtaattgcaaagaaagaaaagaaaaatccaagccagagatgatcttactcccatttcttagcataaagcattttattatcttttttatttgtttgttttgagacggagtctcacactgttacctgggctggagtgcagtggcacaatctcagctcaatgcaacctccgcctcctgggttcaagtgattctcctgcctcagcttcccaagtagctgggattacaggcacccactaccatgcccagctaattttttgtatttttagtacagacatggtttcaccatgttggccaggctggtcttgaactcctgacctcatgatttgcccgcctcagcctcccaaagtgctgggattacaggtgtgagccaccgcacccagcctattagcattttttgagacagaatgtcgctctgtcgcccagattggagtgcagctcactgcaacctccgcctccccgggtttaagcaattctcctgcttgaattggaggatcaatcaggagactgtatttgtattcctgagtagctgggattgcaggcgcctgccaccacgtctggctaatttttgtatttttagtagagatggggtttcaccaggttggccaggctggtctcctgacaacaggtgatccacctgcctcagcctcccaaagtgctaggattacaggcatgagccaccgtgcccggccagtataaaacactttgtccatgttgtcattgtgtcctagcctatgtcatccaacctatatgtactgccagtttgttcttctaggaaactcagacttggtagttgattggtttaacaaatgttggttaaactgggattatttgggaaaaaaaaattgtgtatatcaggaaaggccagattacccccagattgcagtggcttgaaacagccaaggtggattttgtcactcgtgctgtattgagtgtcagcttggagcccgtgcggacagatcatgaaggttgccaatggacatagtaaaggcagaggggtctggtcttccattagcaattatgtgctcttgctgaattcacatgtgtcacttctgctcatatctcattggccagatgtaatcacatggcctcacaccttactggccaaaattaatcacatggccgcactcaagctaaatggggtcaaatgctggccaagtgtggagctagaaatatatggcaaatagcactaacggccatcttaacactttaaacatcttattttaaccaagaacatttaaacagacatctcttgtacgtaggaccaagaccctttctttcagtattggtctcctagttagcacacgacattacattcttgtttttgagacagggtctcactttgtcacttggactgaagtgcagtggtgtgaacacggctcactacagcctcaatctcctggactcaagagatcctcccacctcagcctcctgagtagctgggaccacaggtgcatgccaccatgcctagaaaattattgttgtttttgtagaggtgggagtctcactgtgttgcccaggctggtctcgagctcctgggctcaagcaatcttcccacctcagcctcccaatgtgttgggattacgggcatgagccactgcgcccagtagaacatcacattcttgtataagctccacccacaaaccacaatgagtcatttttttaagtggcttgagaacctaaagacatttatgaaacaaactgggggctgagtcttcctaggtttttataagctttttcattaaataatttacagttgctttacttgtacctaacttggcagcatttttttttttttaagagatggagtcttgctttgttgctcaggctggagttgcagtggtgagatctcagctcactgcaacctccaccccctgggttcaatcgattctcctgccttagcctccagagtagctgggactacaggcatacaccaccatgcccggttaacttttgtatttttagtggagacggtgtttcaccatgttggccagactggtcttgaactcctgacctgaagtgatctgcccacctcggcttcccaaagtgcagaattacaggtgtgagccaccacgcctggcatgtttttcttttaacaactcccttttagtctttccaaagcaagcaatctggtttgtgtataaacaactgtcttgcattaatttcattagtttgatagtaaattaaacaagaacttctggcataaacaggtttggatcaaacagctacctttcaggaagtaaacagcttgagagatggaagtggaattgcttagtcataatagtagcctgctagccccagcagtgggcttcacagatgaaaaggaaagtgtctttcaagttggtggaccgagttaagtgagatggtttcagagagttttgttgcagtattactgatagaatttcagcctacattttcatttcactttctgacatgagttcccattttgctcactctggagtacaccctggtataccgctctccatgcttatacaattcagggcattcaaactcacgtgtgtcctgatgggttctgagggatgggaaggcattaacaggtagagaacaggaaggatgggagagagattttttggggggcggcagcaggggccacagtaccaagtttggatttaattctaaaggcactgggaagccattggatggttttgattattgtagtgacagagaaggcagcaagagttaggagacgtcacccaggcaagagatcttgatggtttggaccaacaagaatggggagaagtgaggattccgggagattaaagcagctcctgttttttctccttcctgctgccaggttgtcctcacatgggtgattgacagggcattggaggtacctgttgataactaacttgcagtttgtgttcagggagcactgactccgtttggccacaatgcaggttggatttggggtttaaggctgggctccagtcagccctcgggagcccctgggcaggaaaacatggacaggcctacgggttcttctgccatttcactggccactcctccgtgtcctttgctggttgcttctcattgtcgtgactgctaaagggatgagtgtcccagtctctttgtgagctcatccagtctccattcaaacactgatgactcccgaatttctctctccaggctatgacatcaatatctatctacattgtttagtcaacatccgaaacagaagtagggactccgtctctaacctcctacagctgtgtctatttctcctctctaccttcactcgactccgcccacactggctcccttttattccttctactttcaggatttgtctttgctgttctgtcctctttgcacacttttccagccatctggaatggcaggttgctcacaggtcgttttcttgacttcccttgcttgctaactttacctcgctatggtcatatcccatcgccctgtggatgtgcgctagttaacacttagcacagcctgtgattatgtctctccccagtggaccgtggggcctgtgagggacgtggtctgattcggtcgtcgccgagcacagaactggacagggtactcataacagatttttgttgttgtttttaaagaaaagctaacatttgagtagtgactgcgccaagcagtcaagcacagcccctcgggctcgatccccataaccactctagggttaggtattacccacgtttaaggaacaaaaatcgagggaaaaatcttatacaactactagtaagtagtcattccattttagcagagcgaatgagcgaatccacggaaggccggggagcgacgtgagtggcgagaagcttggagtcgccagggacggcgggcggagcctgggcgccggggctaatgggcggagcctccagggacagctggccccgcccaggccgcgcggggcccgctgggagttggagtcccttgcccacctcgccacgtcaccgactgcaaaccttcagctgtctcaggctcgggtgcaatccgtaccctcagtgggttccctttcagtgggttcctttgtccccaggcccattattccgtcctcccctcttccctgatgtattttggcgcggtctcctggctctgcgggcccagggctccggatgaggtctcccgccgtcccgacccccgcaaggggccagcttggtgtcgccttcgttcttctgccaccccattcggtaggggctcccgttcccgccacgccccctgaagttgtggctcgcgcgtcttcccaggactcccccgcgccggagaggcccgcaggaccgccgagcccacactccgctcccgcccgggccccgctcccccgcgccgccttggtacgctccggccacgccccctcggacgcgcttggtacgcgccgggctcccccgctcgcctcagtggttcggccgcggcgaccccactccggcggcgcgtcccccgagcttggtacggctcagcccgtctcccccgaagccgcgcgcccgcgcccgcgcccctcagtcggtggagcccgcagccccccttgtggcccgcggcagctccccgcccgctcggcccgcgcccgccatggtccgtccgcgccgtgccccgtaccgctccggcgccgggggccccctcgggggtcgcggccgccctccgcggcccctcgtggtgcgcgccgtccgctcgcgctcctggcctgccagcccccgaggcccgcagcctccgcggatccgggcccgctcggcccctcccatggtgagccccccgccctttttccagagccttccacggccccgcccccccagcccctatcccgggctcacgcctttgtccgcagcccccgccgctccggggtgtcccctgtggcccgaagggtggtcccgcccggggccgggttcccccgtggagcacccggtggttcgcgccgcgctctcccctttgttgcgcgttcgggccggggtggggggttgggggacgggggcggggcgggctcatattactgctgactccgcggcccgatttaaacgcgggctgggggcggcagacaggcagccggcacgctcgcttgtttttcctattggagagttgctcgctctccgggcaggaaacctggaaatgggggcggttttgggggacagcggcgagggaggggcccgcgctttgtaccagcgcccccagatgtcgcacccgtgggcgttctcccctggcggccgctccgtgcccgtggagtgcgcacctagaatacgcgcccgcgcccacatgtgggatgctttgatggactgccgtgagcccagaccttaaacgtaaacattcagcttcgcaggtactttgggctgcacacgcttctccggacccaaaagatgcacatgcttttcagaaaccgtaaggtttacctggggctgtaaaaccgcacatcgcgactttgcaccgtgcacacgcttgccccgatgtgagatttcccctgggttcgcgctcgggtccgcttcttaaatacactgcctcagcggtgtggatggcacagagctgtggcagccctactgaaaccttaaacaggcttcctggggtcataaacatggataccgagacttagatcacctcccacaacttaaacgtaccccttcactccactgccttcgccccttcctgcagcattcgcatctagttgttcaaaagtgctttccgggtcctcagacatgcaccccaaggttttaaacctcagtgcaagtactagatgggcttccctgtgcaatagggatgtcaggcgcgcagttttgcacacgattgccaagatgtgagatttactttaggttgcaccttaaccgtcgtttttaaatatgatcgtcccatcttgatgtgctgctcctgctgtggaaggtatccctgggttttaggcaagcatatgtgttctttactatggctccagatcccagcatatttgaagtcctgagtcaacctgctctcctagacaagcagacattaagtatgtcgcttgggctcttaagtgcgttctcctgacttttacccatctttgtggcagtaaatgcatacgtgtcactgtatatgcggactagatacctcaggtcccagcgccataaacaacttgtatgttgtaagtgtaccctcatctcgaaagtcacctccagctgtgcgttttaactcatctcagatgctggatgtccggtatggtgcctgaagcccccggggcaacatccactctctgtccaactcattctaacgccaagatactcaggttttctatctgatcttctgacgactgcccaaaagtcagaatcacctgcgtgggtgaagaatcacctgcgtgggtggagaatcacctgcgtgggtggagagcaagtttgttcaggtttttctctttttaagcactcacaaaataaaattttttgtgtttgctagtattctggaaggaaagatctccttgtgcttcatagaaaatttggaaaatacctgtttgtaataagataaaaataaatcacccttataatttgttttcccccgcctggaggcgcctattacggggaaactctcgtgggtttcctgctgccaggctgtttgcggagctttcccttgtttgctttgagat[134 bp omitted]accccatctctactaaaaaaaaaaaaaaaaaaaaaattagccgggcatgatggcgcggcttgcagtgagcgaggttgcagtgagctgagatcgcaccactgcactccagtctgggaaatgagtgaaactctgtctcaaaaaaaaaatagtaataaaaatagtggggagagtgcctgtgagtagcatttgtggcgttgcttggctttattgctagaactttctcttggtgttctacatgttttggtctgtgagacccctctgggggtggtgtcccagctgtcttccaaatgtttcccccttttcctcgctgtctttctcctggatggtttagtcccctctgtgtttcttgtcatctccttcctgcctccccccggggtcagacttataaggccagagaggtgggcactggcctgagccagaggaaggaattgaactttgggatgacagggagctttaggagagtttcagcctgggaaagacagggcaagctggtgtgtgggacagacacagcgcaagccggcttgtgcctgtggaggctgcaaggaagccctgggcccagcctggggcacggggaaagccccctacagctggcttctaacttgggtctcaagaatcgatcaggcgcacagctggggcaaaggctggaggtggggctggctgaaggcttcaggactctgctgggccagtgtcaaggtgacagcaggctctgggaaggaagggtcctgagggtgggcagcgggaaaggacatgaggaccagcgtgtgggggtcctgaggggtgagcagagggtttggacatggccccgtgggcttccagcaggggatttggggctgaatattgggacgtcccctctggggtgtgtggggactgcctgtccttgcaggccccggcctcagttttcccacctatcccccactccattgcaggaaggtgctcgggtcttcggggcactgggtcccatcggtccctcctcacctgggctcaccctcgggggtctggccgtgagcgagcaccggctcagcaacaagctgctggcttggagcggcgtcctcgagtggcaggaggtgagtctctgtggggctgcggctggcctccagggtcttgtcttgtccctgcggggacaggccagggcatctaggctgtgcacagtgacgcccctcctgcccccacagaagcgcagaccctactctgactccactgcaaagctgaagcggaccctgccctgccaagcctacgtgaaccaaggcgagaacctgtgagtgccggggcgtggcagccagggcggtggcaggggcagtggctgtggccgtggggatcagggcagccctttctgaccagctccttcccatagggagaccgaccagtggccgcagaagctgatcatgcagctgatccctcagcagctgctggtgagacccgcccctcccaccccatccactctgagcacccccatgcctggctgacccagctgtctgtcctgtcgcccccagaccaccctgggccccctgttccggaactcccagttggcacagttccacttcaccaacagagactgcgactcgctcaaggggctctgccgcatcatgggcaacggcttcgtgagtggggcgggctcccttgtagcactgtggtgacaagtacagctggaggcagcgctctgctcacacagtccaggcgggggtcggggggtctcccctggggccgagggtagccctcgtggcctctcggaccccatctggaaatgactgactccaggcaccctccgtagagcacagggtgaaggaactcagcctgagaggcctccagtttctgcatctgtgcccagcttcgaggtggccctgggggcgtgagtgcagggagggactggggccagccctgttggggcccaggagcctgtcggggacacatagcgtatggcagggacctggtaaatgggtgtgctaggcacaagagccagccaggagggagtggcacgttggggcttggtattctggtctgtaaaatgggctaacctccccgagtggcctgagctggccgtgagggagcagagctgagggtgctgaagcaggcgcggtgagtaggtcctcaggcctggctccaaggggacccaggtatccagccagtggctgtgcagggactgagtggggcaggcgcggccatgacctggacccggggggctgccaagggatctgagagcggcttccgcagcactccagggttgggctggttgaggggtagagatgacattttctgaggtagggaggacaggggagccgtgcttcctagggccaccgggaggctggagggagggaatttgtgtaaagcgcttgagatggtgactttagtacctagtgagtgctgggtgaacccagctggtgaggctgttcaggtgactgagattctggcgcagggcaggtcagaaagggggcttgggctgtgaaagatggcaggtgctggagaggaggcaggggtggggtgggagcgagttgtctgcccagaggacctggctctgggacattcccagtccctgttccctgttgggacagtctgcctctacccgtcccagctgccgttgagcgccctgggttccgctagggcctcccttctccctcaggagaccaggggcagaccagggcttgtgcctggcatgaggtctcttaagtgacccgttcccccttcacccagcaccgtttgttgagggcctgccatatctgggccccgagtacccagtctgtagggaaagtggacatccatactcaccccccaggcatggccctgggaggctgactgtgcatggctccagggaggccagggacagggccctgagcgggtgatccctgggctggacaccaaggttgagaagttaggccggcagcgtggaggggacagcactgtgggggtggcccggtgtggggaggggacatggggttttgggacggtcacaccacttcatctagacaccacagccaggcacatctgtcaggcttagttctcccatgcgccatcctcaagaggcaccagcactttatctgttgagcctttatgtggcaccaactgtgtgcactattacccggttttacagatgatggaggcccagaagcaggaggtggctggtgttaggtcacacagctaggaggcagcagaacggtggggcgctgcctgtgctcttaacccccaggccaagtcaccccatcaggcagtcaggagggctggcggcagggggtgatgtgggtgggaggtagtgccttcttggcattctcaccgcagcctgggtgccgggtgccactctgacctcagccatggcagggtcgggggatgccgatgggcgctgcacgggctctcagaggcccctcacctatggccatggccttgactgtgggggcctctgtccaccgatgatctcccttcatcccctacaggtggggcggtccagggtggtgggggcacagtggccccgggcagtgaccacagggtcctgacccgcggcccccgcaggcgggctgcatgctgttcccccacatctccccctgtgaggtgcgcgtgctcatgctcctgtactcgtccaagaagaagatcttcatgggcctcatcccctacgaccagagcggcttcgtcagtgccatccggcaggtcatcaccacccgcaagcaggtgtgccagccaagcacagcccctctggggacagagggggattagaccccactgccctggttgggcagccagacttggtgtgggcggagtgtgatgcgatggctggagcaaggagctgcaggggagcccggaggatgccgggcgggttcccaccagggctccatggaaaagcggccactgggcggctctgcagggctggagggtgggtcttggcgcggcggcagggaagccagcggagcggggagctgggcaggggttgggatcgtcctgcggctggaaggccctgcctggtaaccacgtgtcctggtcatgccttgccagttgaggcagactctgcaggtcctgtgcaccaggtgagggccgggacctgtctcaggccactggggagccatggggggctgtgagcagatgaggggcagggcctgttcccctgggactagagaatggacccagctggggctaacaggccaaggctcggagggagggatggcaggccccaggacagacagacaggtttcccaggagcctgggcccctcttcccaccccgttcccttccaacaggcagtgggacctggtggtgtcaactcaggcccagtccagatcgtcaacaacaagtttctggcatggagtggtgtcatggagtggcaggaggtgagcactcggcagcccagggacttgggacccccagatcctcacggactgtggctgggaggggacactggcattgggggtctccagccctgagggctcctctttgcctctcccccaaaagcccaggcctgagcccaacagtcggtccaagaggtggctgccatcccacgtctacgtgaaccagggggagatcctgtgagtgctgggctggggggtggaggcagcatccaggggagctggggcttcctgaccctcgtccctttgtgccccacaggaggaccgagcagtggccaaggaagctgtacatgcagctcatcccgcagcagctgctggtgaggggctggggccgggtgctggagcctgcacgcagtagctcttccagagggcggggctgggggcaagagcgcctccccaggtggcctgagctggctgtgagggagcggagctgagggtgctgaagcaggtgtggtgggtagctcctcaggcttggcttcaaggggtcccaggcagccagctggtggctgtgcagggactgagcggggcaggggcagccacgacctgcacctggggggctgccaagggatctgagagcggcttccacagcactccagggttgggctggttgagcggtggagatgacgtttcctgaggtagggaggacaggggagtctcagtttggtcctgggcccgggggactcagcgggctgggagccgggaggccgtggtgggagaagccagagctgggggtcccctcgcttccccgcagaccaccctagtgccgctgttccggaactcgcgcctggtccagttccacttcaccaaggacctggagacactgaagagcctgtgccggatcatggacaatggcttcgtgagtggtgccagcagacgcaggggaggggccggccagggcagagcgagcccggaccgctcacgggggcggacatgggagaggaacagagcaccatgtcccagaccagctggggagagagggtggctagtgtgggcgtgacttctgggggctctgtgctgtccccacggcactggatggggcactgaccctggttctgcgggggcctgctcctcctctgccacatcagggctgactcagcaccaactccgcgctctccactcctcagggacaggcgcccttgtcactcctggtttcccgggagcttgtgccacatcccaaaggcccattgctgggcagggagggctgtctgcccccagcaaggtcccagaatatttggcgattgtcttatctgggggaggctcagctgactcctcttctctctctcgggctcagtttctccatctgtgaggtggagaaggttggactttggtgtttctgagccctccccccgatgtccaccttccagctgggccatacttgggtaatatcccgaaactaccttaaaattaccttcgactcagtctgagtaaactgtccacgaagctgttcgtgggtggggggggcctgggtgtaggtgcttttacatgaa[207 bp omitted]aacccgggaggcagaggttgcagtgagctgagatcatgccattgtactccagcctgggcgacaagagcgaaactcagtctcaaaaaaaaaaaaaaagtttcctcaaggaaacccagaaaggctccatgtacctcagcccttgcttgtgctgggccggccgctgcagatccctcgggctcctgagttgaagccatggccggttggctcaggtggctgtggtgaggtggccccagacacagcctggcctgcccaggagctctgaaatgcaggttcttgggcccttcccgacagagcctgttggcctttggcccacccattgctcttggccaccgtgtcatcccaataagggggcccacctccagggtgggtggggggtgtgaggacagagcagttaggctgtgcctggctcatggagcccacggcatgatgccgtggttggagggatgctggtccctgtggtgctgtctggtgacaccacgccctgtgcctgccaggccggctgcgtgcacttttcctacaaagcatcgtgtgagatccgcgtgcttatgctcctgtactcttcagagaagaaaatcttcattggcctcatcccccatgaccagggcaactttgtcaacggcatccggcgtgtcattgccaaccagcagcaggtcctgcagcggaacctggagcaggagcaacagcaacgaggggtgaggtggccggcctccagggctgctcagtctccctccacccccgctgcctgctcaccactggcctctgatttctcgccgtagatgggggggtagtggttaccccgggctgggcccctccaggagtcacagatgaggcccccgcagagactggtgagtggtgaccctgtcatgtacaggagggaccctggggcatgtggggggggtggggttgggaaagaagcagggcgaccttggccttggggagagcagagcagagggagaggcagcagtcccagcggtcctaggctgtcgggaaactgcagcccagcctcagggccatgggaggtggtatccaggcctgggtggggccaggcctctgctcacagggatgtggggtcagtgcttgggagcctgtggccagcagcccccactgcacccctgcccccaggtgacacgcttctgagcaggggcccctggggacttcaactgcccagcaacatggaggatggtgtcctgaggcctccaaggacggtccccacccctctacgtttccccaataaagccttttaaaaacctgcctgccttctctgctcactgcccgatgccttgcagccccctagctctaaggtggcccagcaggctggacagcccgggaactcactgggtctggctctcggctgtccacaccctcttcccccccgaatctccagacccgcaggccttgggttcaagttcagtgtcacagaacctgagctggattttgtcctcaggggtcacacctggccttgagccagcccctcggttgaggctcgtgggctcaccagctggctctcggggggccacacagcgccctccctgtgtgttccccggctaatgtctaaagtgctcatgccaggtcccagctggactcccctcggtagggccccaccttttgttacctgaaaatgtccttaaagcctcctccatgtaagaaactggcaggcctggagcccctcccccgtggggaccaccctccttccagcaaaatgccggccaagctcaaggagaaacagcgtttattgtggaggggagctgggcggggctcagccctcggagaactggcagtacagccgccccagcctcggctccacccatagccggaacgggatctccaggatggcagagaagccttcagccagcgttggggcctcgaactgcttcctggcagtggtgggaacagtgagggacagcctggatcatgtggcccagccagtgcccctgccccctgctatccccaacagtacctgtagccatacatgaccatgtctgacacggggatatgagaggagtccgtcatctctcgaaactgtggggaacatcagaggggcggcaggcccaggggtcaggggaggaggggggtcagggggtgcagcccggggggtgtccgggctgagcgggctcacccggttgttgtggcgcgcctgctccagagtggcggtgaagaggaagcagcggcaggggacgcccgcggctcgggcacactggacgtacctgtgggggaaggagctggatgtgcaggccccgcccaccccgccgcaggccacctacggccccgcggtcacgctacctggcgcggctcgcggcgtctgggtttgtgttgtcgatggcgacccgtttcccttgcttcagggctgtctcacacgtggtcacacagcgctgccaggagcctagcgtgtcctggggacacgagaggtcacaaacagatcggcagacccagggggagagaagaccccgagcggggacggggaggcaatgatggaggaaagccgccccaaaccagttgagaggtggagatgggaactttataatagatttggggcggcaaaagcctggtcataccctgttcacgtggacatatccggccgacacgaggtgcttcttgagaaaggtggacttcccggctgtgtggggggcagtgtcggtgggtggcctaggacccaggcggggctcagggcacgcgcacaggaacaggacacttacccccagggaatcccactgcgacaaccacctccgggctggcgctcaggagggccctggactcggggaggcagagaggccctgagcgggagacagtcctctgcgaggggcgggggacacgcgtgagatgccgtccccatccccgggagccctcccatccccacccccacccccgccccagggcctcaccggatcaaaggctgggagctcgaagccggctgctggccacttgagaaagaactcctcaggcgtggcgaagggcaggccaaggttgagggcaaactaggggttgaggacgaacatcagacacaggccagggtcgggctcgggcgcggggcagggggcaggggcctcaccaggcgatcggcgcaggagaagtctttcttcttccgccccggggcccagttggccgggcgtccggctgcgtctggaacacacgggacaccccgttcccaccagctcggagggaggcgtcccagcccaccctcagcagcctccaggcccttacctcccacaaagatgctgtccccgatggatatgggcgtgccgtcgttggcctacgggagacggtagtgaggaggcccttcccacaaatgtccccccgcagcggtagcgggtccctggggctgcttcgcctggtctgtgccccacatcaggaatcatcccccgacctttcatgtcctcactctccagccactttgcaccgtgctcctggccccctcccccctccgtggtctctccacacagccccctccctccaggtctcccgacttcacctcctcccgttccccacgcggccaccggagggcacccaccctgctacagctccagcctccggcgtgccggcgcctcccaggttccccctccctcagggcaaaagcggggccctccctgtggccctgccctctcccctccctcgcttagagccagccgcatgggcctcgctgtccctaactagcccaggctagggactgcctcagggcctttgcacttgctgtcactcccacaaggggggggaccgctttccccaggtgtccacctggctccctcctttccctgccttaggccttttcctctgatgtcacctcctcagaggccatccctgcccaccacgggtgatgcctgctttctccagctccctccctcctgctgttttacacgccagtctgcccatccgcctagagtcaccgccctcgccgtgagggccctgctggagcaggccgtcccgctcactgataccttcagctcaagaatgcgctaaacttcagaacaaatgcacacacaaacgaatgaacgaaggaatgaacagcttccctactactctgatgtagaaagtctgaaagcactggtctcgtaaaccaacatctaagatgtcacagcaaaaaacagaaggagggagcgagagaggacagaggagtaaggaggccccaaccggaggccggggagcccaggagtgaggggctggagtgaggaaaaggaggggggccgggcaggctgcaagactcacctgctcctgcagatggtcccacatgcccgtcaccggcttccggtacaagcctgcgtgcgtggccaccagcacctgtggatgggagggggccaccagctttagctccccctcaagcacctactggatgccaccccagcccagaatttgtagctgatgatgggttcctatcagcatcacactgcctgaggcctccgccccgcttaccctggagtctaaagccctcgctctggatctctgtgcccccacatagctcccagcctcccttccagccatacctggaaggggacccccagcttctccaccacagcctccaccttggccttgaactcctcggctggcagcttcccgcgcccgatgctcatctggttggtgaagatcaccagctggggagcaaagggtgtcaccagacgctctgctcaccagggccttggtctgactgcggtcggaccgccacgtgcacgtgcccatgcagacaggcggctgcacataccttgtagccctcggcttccagctctcggagcttacggggaatctctgggtacaagatcctacggcaggtatgaagcggcaggggtgacccggggccagaggtggactccaggcctcactcactcccttgttttgcctcttatcacctccagtcactggggccagtgggaaagaccttcccagagcgtgtggtgatgagcgtcccgtccagatcaaagccagccacctggtgtcaccaaggaaagacaaacagcagcactgtgatacctctgaccctcctcactcacaggctgactcacaccaaccctgccaggcagggtgttatcactgccatctcacagatggggaaaccgagtcacagagcacctccatctcaagcatccgtgatgcctctgagtggggcccgacatcttaaccttactgtctcctgttactccttatgacgccagccccaggattacagtctttaaaatgggggttaatgtcttacccagcctccttcttcccctggccttcaccacctcggtgggctaataaccgtgaaaataaaagcaggagcaaagctttgggtgctaactgcatgtcaggaactatgccacgtgctttttttatggattcagcatcgtagagatgagacacatgggactcagaatgtggtggtaacagcatttgaactcaagtctctctggacataaaaaatcctcatcgtaatagctcctactgagacagtcatggtcattgctgattactgggtggtcactgtgggtaacgcaggagctgacatatatcattctccccactgcttaactgcttacaacgatccctgcatttatcattaggcccatttctcagaaaagtaagtagaggctaaaaagttgagagcacgcaacaaacgtgggattgggtcccagtctgtggcggctccctcagccctcggcgtggccctcaccttgccctggggtttcaccccagctgcggtgaacactagcaacttctccaagttctcccagccggggtttgacttccgcatacgcttcttcggcagctcagcatctctcttctcatcttgggacaccagaggggtgccaggcggagtatctggctgggattctggtgtgcgggtctcttcccagcgcagggtcagtgggtggaggccattgaccaaatacagtgtgtcccccacccccagagagccctccaaccccggcttcaactcctgggtcccggtagttgaggggttaactcccagctgcagaaagagagggaggagctgggactggctccgcccccaccgggagcttcctccaatcaaatacccagcggaaaaatcagcccttctccaccactatcagacccttaggccccacctcttcactttggaacgggctttggaacggttacaggttttcagccttgtccgaatcttttttttttttttttttttttttcccctggagatataggcttgttttgtcgcccaggctggagtgcagtggtgcaatcttggctcattgaaacctgtgcctcctgggttcaaacgattctcctgcctcagctacccgagtagctgggattacaggcacccgccaccatgccccgctaatttttgtatttttagtagagatggggtttcgccat[139 bp omitted]ctgaaacaggcaacacttctttctttactggacacatccccttctctcccagccatattttttcttttctttttttgagacaggttctcgctctgtcacccaggctgaagtacagtgtggtgatcactgctcactacacccttgacctactgggctcaagggatcctcccgcttcagcctcccgattaggaactacaaggacgcgccaccattcccgctaattttttagagagacaggt[136 bp omitted]ctgacggcttgcaattcctccccaaatcccatccccaggccttgctggcccttgcagaggcactgatacctgtttcactgccactgtccgggtctcaggatctgcgaccagctccactgaggattggaggggtggagtcaggatttgcatccttgtgtgattgggtccctcatttctggggagtgtggcctgcttcaggctatagcatccagggagtaagaggcagtttatttctacatgggattggctccttgacatgcagtagccagatagtggcactaggattgcctgacactggtccttgcaagggacagggaggtacttttctctacagaattggtttcctccttgacaaaaaatgtggctagatataggtccggggcttggcctgttaccatccatcccaacctagcgacatttacttttctccacaggatcatttttctcttgacgaaggtcgtcgcctgtttctggatttcccgatggcctgagcatcatccgcgcagtgaacatcctccctaaatcggctcgatcccctctcccccaaaggatctagctaattctaaatcaagcacaaactttatcttcctgtactccctagagagcaccttccgacttcggggctggctgcaccactgcaatcccgcgtagcagccaagcgtccctctggattgttcccgcttttgcagcaggccacaccccctccagctcaggccccgctcaccttgagttctggagcacttccggtccgtaacctgggtcaggggtcccctgcccaggaccagggcttgcccgtccgagggcaggaagatggggggcgctcccccaggggggctctcgagccacaagcggcccggggcctccacctcgcccatcctgggtgccggcctggggagcaggtaaacgggcttgagcggcgcacagccccaatttgctgcaggaagtcccgcctcctcccacatccactagaaagtttccccaccattaactgctccggaagtcccacccgctcgccttccgcgggtcgacccgtttcccaggcgacgacgcgtgctccatccctccccgagttgcaatccccactttccagcgtacaggcagagagcctcgcacatgcctccgccccgccccgtactcacccgggaccgcggcttgggctcacggccacttccgaccagggaggtcctgcccgaggtgccccgcctgcaacccggccggcggcggtcggttcctcggcggacggaaatgactcgtcccctcgtgggtggggggcggggcctggcctcctcccacagcagccacgccccttccccgactcccggcccccagggtctctcggcagccctgaccttcatctctcttgctgcaacgcgaggctcaggccggtagcggggactggatcctccgttagcagatttgcctctttccaccttgacttctaattttcatcccagggaggaagatttttttcccatctgatggtcattgtcagtcgaggaaacctccgcccccgacagcgcccctaagtccttctttggcttcaccctcgatgttctagtttcctcatctataaaaaggataatcgtttccgcttcgtggggttaccatgacgattaaaggagctaacacgtgacaaaagctttaaaaaatgggtggtag[136 bp omitted]agcctcccgagtagctgggactacaggcgcccgccaccacgcccagctaattttttgtattttgagtagagacggggtttcaccgtgttagccaggacggtctcgatctcctgatctcgtgatccgcccacctcggcctcccaaagtgctcagatccgtttaagtcttatttagtgttagcattctttcggtagtggtctggtgggactacgtttacctagtcctaatttcggacgaggttccacctgctttctaacctccagccatttttttttccctttggagaaggggtctcactgtgctgcccaggctgatctcgacctcctggtgtcatgtgatcctcccgccttggcctcccagcgtgttgggcttataggcgtgaggcaccaagcccagttgctccagtccttttataatagaagactcccggctggagttcctggctttgctggtgaatatgtgggctctgtctccaacactcacctcctcaagattgggttccatggtcacataagactgggatgctctcctccacc[137 bp omitted]atgatgaaaccctgtttctactgaaaatacaaaaattacccgggcggcagtggcgcgtaatcccagctactcgggaggttgaggcaggagaatcgcttgaacctgggcgagagtgggaccctgtctcaaaaaagtaaataaaatgggcacagtaattccaacccccagctattcactgataatcagacgctgccattcggtttcagaaaatgttgaatgaacactcacaacacacttcacatttatctcagaggtaaaactctttaatctcagagcgcccctcccaactgccgatcccccaacccctcactctctcccccacaccagggccggagagtgagggcccctgccccccaccttgggtggacgagggccctttaaggcacctgtggaggtggggggcgaggggcgggagctggtaccatcctggatgcagggacgggcttcgattggcaggctgttgtggggatggatggaaccaatgaaagggggtgccagaggcagggacagtttggggccatccctgagggggtcagggaacaagttgtcgggacgtgggcaaagacgaccccagtccccgtagtgtaaagaacgtaaattgaaggccccgggccaattctgggaagaggagggcttggccacgcccccaggaagctggagccaattgggagggagaactcaggaaaagcggacggtgactatgtagagactggtcaagccctttacaggatttgagccaatcaaaaaaagagctgtccagcgactaggggatggagccaatgccgtgcgagcaaatcccttgtcgctaggcggaaaacaaaggagttgacccatttagagcttagaactcagcgagccaatcccttaatagaaggaatctgtcgctaggcggagagagacgacagacccaatcgggaaacgggacagatgccgctcctcggcgcggcaggtcgtgggctggaaggacggcggggattggcagaggcgggacaatcttgggaatgggagacgcaaggaggccggtcccggatcggcctcagattagcaggccccgggagtggggcgggggcgtagtgtgggacggggcggacgcggcccggggcgctccctccctggacttcaatatttccgcttcagcttctggaagtcgctggtgttaagccgcggccgtggcaggtccccgaagacctgggtgtcctcggcctctcgcagcaccagcgcgcgcatgctcgccgcgatgcggtccaggtcgggcgaagagggctgcggggacggcgacggggcgaggtcagcgccggcagggcaatccccctgcacccacacgcggtccaggggtgcacccgggctccaagcccacttctagcacgtccctgccctgccacctgtgccctgcgatgcccactgccagcagtgcccctccccgtcttgctccacgtaggaacccttctacccggttcagacacctcctccacgaagcctacctgcccctctccctctccccttcttggcctaggacattgcttcctacacagtggaagtgctgttgcctgctagccattaaggctgagtgcaccgtctcatgtctgaggatctgggctggggtttcagtcatgttccaatcagacctctgccgctgacaaactatgagcaagaggttttgcttccctaggcctcagtctccccttctgaaaaatggggcggataacagggtctctgtgagggctgagataatcagctgttactgccttatcatgtggccactgcgctacagaaaagatccctcgctgtgtcagcccccgccaaggagcctgcagttctggcacctagtactgcctccactacagcccccgtcacccggagctgggcctgtcccctcgcaggatgggacccggagacccagatcaggaactggacctgagcccagtgggagaccagcccccgggcacagcacgcaagaggccagagcattcaattaactgtgttgccatgagtcgcaagcacagagagcagcagcaggtggaccccgcccgcaccaggccctgttcctggtcttcagtgctcactgcttcattgagggaggatgcacagaaaaggtcaccactgtgactgctggtttgcatataaggacactgaggcttgagggggggactgtggggacccaggcctcctccctcaaagcccacagctccttcctgaaacacacctgggttccagtcccagctctgcctctcagggaagtcacatgtcccctcagtgcctcagtttcccctctgcttcagggaggctcagtgaagggtgaggaggacccacctaggccagcagagcccagcccaggagcttcaaacaggggttgctacaaggggtgaacaggggaccagggggtgggacaaattctgcaaagggctaggaatgtgcagggtggggatgggaggtgatctgaaccctccaagcctcagtttctccactggagggcatgccaaaacacctgtgccttgcccagagcaggtgttctataaatagagacgctcctggaaaggagaggccttctctataaggcactaggacacatggtaaggctgcaattgttaaaactgcaaggctcgtgtccaagaactcgcctcttgaggttgaggggaggattcagttagcttatgggtggaaagcagcatccatgctggagggcttcctggaggaggcggctcagagcccttccagctgccctccctacctccccacatttgcccctcaccggcccattctcctcatctgatgaccgcgcctctgtcctcttctccttgaagccccagacgggcacagacacaggcagggacttggcgtactgctgtgtgggtagggctgaggctgggggcactgagcaggtgggggggccggcgggggtctcctcgctcaggctgccatctgaaagagagggtggacttcagcttctgtccctgcctttgtgtcggccgtgtgcctgccctcaggtcgggaggggaacagcctgggacactcaccatctgtactctcggggtctgactcacagaaggggggaaggtcctggagggtggcgtcctcatccatcacaaagagccctgtggatgacctgagttagaggcccaggccaggcagcacctagccatgctccatgtgtcctcctcctcagccacggccactgccacagccaccacctccacctccctgaagcttctgagacccatttccttcacctcaaaaacaacttcctctagcagcctgcctggtcatcggcaaaaaccaacccagtttctatggatctgccaccctctcagctgcacacaacgggctgctaacatgaaacctctacgatctgttcgggacaatgtgactcaaaacacagccttagagaaacatgcaatgactatgacctctgtttcacaaatggagacctggaggcccagagaagttaagtcacttgcccgaggtcccatggctactaagggacaccaccaggatttgaactcaggatgcctgcccttcaccctacacgggttttctccagcaatggtgaggaggcctgccattggtaataacaacaaacaaggacctcctagtgactgatcaaactcctactaactccgcaaagccctagcgttacagtccagcctccgggaagtgcccgacccccaaattccccccaaaacagctggctgctccctccctggcttcctcagatgttggctgcatcccagacaactctttaactcctgcttggcctcccaggcgttgtggaaacgactctggttctacccatgacctgccccagagcctcccaacccccaccgggactccagttccttggctagaccgggagccccttgagaaaaaagcccgagcctgctctgtgtccttgtgcccaccactcccagcacagagctggccccaggaccagtaaggctcagagcagggaagggactggctttagatcacacagcaagccccaggcaagcctgtctggctctggggtcctgagactgcacttctgtagaagtactctgggctaagcaggcccccaccccgacaaagcctcctgcgggcacctcaagcgctgggccgcacccgcccctgcccccaccctctcacctccattatcactaatgcccagctgctccccggaggtctctgtctctgtgggctcatcctcgtcctcctcgttgtcctctctggccagggtaggccggggtgggctgggtgtgggactgggtggctgtggtgctggtgggggcgcaggaggccgagcagcagtggcagccctgtgggccagtgcgatgtcgtggaggcaacggcgcgctgcctccgccagggctcctcgaccatgggcagcataggcacaggggcccgggcggggtggtggcggcggggccgcggtcagcagcaccagctccgtgccagtccgggcccggaagcgctcagcggcccccaccacggcctcccacagctcctcggggcgccccgacgccatccgcgccctgcgggccagagcaggacagagggggctgaggcttggcggcctacatcatcgccacccactcagagtgcccgcccgtcccctggatggcactcaccaccctccacccaccttgtcccagcggtgctgtgtgtcctccccaaacctgctactccccaggattctcaccatccagtcctcgcaggcccagaccctggcgacgtcctctgccccaacccattcctcctgccccaagtcactgtactccttcccctttggccctgccctggcctctgtgggagccgccagccacatgtgaacagggagtactggaaaggcagggagtcctagcagagagtcctagcagagaggcctctaacaataaaacctgcactgggttctgaagactgagtacaataaagccgaacgagccgggcgtggtggctcaggcctgcaaccccagcactttgggaggccgaggcaggcggatcaccgagcccaagagttcgaagccagcctgggcaaaaaaaaaaaaaaaaaggaatttcatctgctttttttactcttttaacatggtgtctagaaaatttagaattccacgtggggcttgtgttgaatttgatggatgatgccaccctgctccgtcgcccagccatcccgtcaagagtgtcctgcacaaggcccagggggttccttcagcacccggagctgatgctactcctcgccatagtcctcagggcaggccctggaggctctaggtgttctggccatccccagctcctgggccatcctgcctccacggccttccagagcctctgaggcccgaggccttcagaaaacgtggtccctgaccttgatgacttgtgctccattccccaccaacctttcactcatcctagggtggaagaaactttccctcgcccatagatccagccagtctgctccatagggggtcccacactgtctgagtggccaccttcccagcacacttccttccagagggaactggctggttctatgactgaggcctcagagagtcggggctgaaatggtgctggcgctgctctctgtgctgggaaatccacacggcttttcctacaagactgttctggcaggtcctctgttgtccctgatcccccagggtgcatcagatgacttcaggagcccatccgatgccctgggcttcctccatgagcattcatgtcacctgagcttgtgacagctgtaacctggctgcctcctgcatcagactgtgaattcccccaaggtcagggatttgtgtttgcaggacaggtcggccctaagcagacaatgcagggtgcgtctccttactgggtgagaagagcgagggcaggggggctgggtccttgccctgactctgtctcaaacctgctgtgtgaccttagatggctcactggccctctctgtgcctcattttcttccccattaaccagcgtggttgagccagagctgctgggctgcggaagacgctcttccgggaggcagtaagcacaccgccactgcacggattcaggcacagctgtggtccagcccaccagggtgaagggagcagggagtctggagtctgaatgaaatttgcaggccttttatgactcacgatcattgatgttggtgtttgctgagcacctattcagtgctgggattccacacctggcatctcacctatctgactcactcagggagttcaaagccccaagggaaggaagaggtttatccaccacctcccagaagccacgcaaggacccaagatgggatcaaccttctcatcccaccctttcacctacactatgagacaggagctttagttacagttcaccccattttacagttgcaaactcaggcccaggggcagtcagcatcttgaagggccacaactggaagaggcagggctgggacctggactcagaaagtctagatccggggcctgttctaaatcctgaccgccatcctgcctgcctttaggagggcagatattctaatccagatggaaaagtgaggctcagagagcttaggacactggcaaaaaagcacacagctacacagggcacaagtggggctgaaactgtgaggctcagagagcttaggacactggcaaaaaagcacacagctacacagggcacaagtggggctgaaactgctgactgcccagccccaaaaccccactgaactggggggtacccggtgtctcaaacacacccatgtccttcccagctgatgagggaggaaactgaggctctaagcaagaaatggctggtccaaagtcaactgcctcgccgtgctaggcctggggctctcacttccacgggcctccagcccctaatgacatgcggagaagagggggagaggaggtcccggaagagaacgtcaggatgaactctccgtgtactcaatcttggagtagccacgggattaaagagtgaaatagggtgagtgagttgtgagggctcccccaactcaggagacatgagcaaaaaggacagggcgacttccacagacctctttgccaaggtccaggggcaccctgtaatgctacccaacaggagagtagccaagacctgggggtcctccttacccttcagcttctagaggaggtcctgtttcctccaaggagctgagagatggaggaagaacccgccccgatagacgagtttcgtgtaagatcagggagagattagaggaaagtgagacgtgttccccacaggagggggagcacgatgtggctgtcctctttggatgcagggaggagggaaaagagctaaggaggagaggggtggaaccacccctcctgtcgaaattttagtaccccacaccccaagatgtgaggaacctgagcatgaacgcggtagccatggggtgagcgcctggggccacgctcagctgccccgagacctcccaacctcgcccggggtccagggaggacccactggtctaggaagaaaacaggaaatcccgcccagacggaggccaggaccggaagtcccgcctttggacgggtgaggggcgccccgaggccccccaaaccatcccccgaccccgtggacgtggtccacggcccaggtagagatcccaggcgctctggaaccgcaaggtgagactgtctacgatttgcctcaggtctgacaggacgattcccacgggcgacccccttccagcgctcagcaaaggatcgctggcagacctctgccctctgatctgtgcaggccatacccctcccgtgagccgctcgccctcccagcgccccgctgcctcaggacggccaaatcctccccacaccgcggttaacaacgccgcctccactcacgtgcccgtagccagcatggccggcccggcgccgtcaccgccctcaaaagacatggcggcgccttgcgtcacgtccgcgcagttgccccgcctcctctccgcacactccgcctcccttatcggggccgcccgagatcaagatggcggccacaggggcttcatccgaaccagttgacaagggtgacgacagcttgcccctaagaaaaatggccccgcctagagcatttccatttgcccccaacaataatggccgtcctcatatgctcaatcatgaccacagtaaacgaaggcaagcgacctgacgtccctgacccacaataaacttcttcgacaaaagtagaggaaatcggtgctcgttaacaacatggcagccaaccgggcttaatcagcccatagtgtatattggctctccctccctccaacctgctcccattcggcacgaaggctggcaaagatccaacacggcagcatttcttgcttcggtttgccaggcttcaaaatggcggctcagcccgctttctcgcgacggtgactcagaaattcgtccggggccgcttcgtttctgggggcactgacggcttcatcccgttatcctgagtccctcagtgcctcttgtggtgtacagctcctctcacctcctcttctcttatccgttcggctcttccagctgtcgcgccccgcagagagatgggacagccccgtattaacatggccttagctgaccggcttaggccatgccctcgagcaaaatggtacctccttggcttcaattccagtatacaatatggagaaggaagtgggcgtttcaaggcgtgcttgccccaggtggtgcagctctcagaccctcccacttgtttacttcgtggcgagagggcgaacactgcgcctgcgcactctccgtagccggatccaccttcagcgtctgcgccacgtgactccgatccaccctcgaggttccagtggaataacccccttctgaaaaatggtttcacccgctccttctctagaacgggtcgggccgctaccactgtccggcccggaggggaactgttttctccggaagtgacaacacgctgactaggaaaaggaggaggcggggcagtggggccttcggcggcgactatggaaggagccggctacagggtaagcactgaggacgcattccctcgcttcagtgtatgcgaaacgccccgtctagtgatcagctcttctctcaggccttggctctcgagaatccggcacggccttggcaaacaccgatctcttataaacgcgccgtcaccctcccgtccaccgccccagggaagaacctcccatggccccgcccccccggctcaggcgactccttgagccctgccccctgtggaacgcacgtcagcatccgaacgcgggctggaccattctccccgccttggtcccggggcaatggccctcccggccccgccccctgagggtggctcctccctgggcccgtccctattggctccccaggctggtcccctcgcttgggccccagccctcgctggttccccccaactcaggtggtgtttgagaagggcggagtgtacctgcacaccagcgctaagaagtatcaggaccgagactctctcatcgctggtgtcatccgtgtcgtggaaaaggtgcgctgggagggagcagggctcggacccgctccgagcgggatgcaggcggtctgggatgcaggcggcagctgtaggagtttggtctggcggtcagcagtgggacctgaagaaggctgggtgtgggaactggaatgaggggcgggactttgaaaggctgagggtagaaactgggaaagtttggaaatttgcaacggaaagttttgggaatgtggtttggggagcgcctctaaccccgcctccctccttaccctaggacaatgacgtcctcctgcactgggctcctgtagaggaggctggagattccacccaaatcctcttctccaagaaggtaggctccacccgctttgcccttctccactcgctttttttctaggtccgtgctgttgtaagtcatttgagggacctgcgtacaatcccagacctactcgtggggcatgtgtgaccctgtttaggcttgggtactctgcctctccttttgctcctctctgtgaaatgggcagaggatgcccattcaaggaaaaagagcagggagcataagacgcacggtcgtggggacggctgacccctctctccctttgcttcttgggagatccctgccagggtgcaagatgtggattcgagttgcttgaagggaaatggcatttcctctggtgccagaggacagggcctgacagcctactcacccacttcgtcactgctcccggctttcccttcgttatgtctcctgggacttcccatggctggaccccgtcctgggcaattctgagacccagagataagtcagatccagacccacctaagccctgacccttactcactttttgagaaactgatagatgaggtcgaaaacgctaggaagtgttggaactttttgcacccagacagtctgattccagatccccaacgcttcctgggagagcagacatttgagctgggactcccaggatatgaaaggacaagaaggtatttcagggacagcagaacaaccttcaaggcacacggagaagttggatgcctctgtaggggggttctttagtggggaatgagacctccattggagctgatgagttccacccaggggccggaagtcagtcggcacccacagagctagtgacgagacactggaaggctgagctgaccacctgcgctgccccagggcaggaggatgaagatgaagatgaagatgactctccaccttgctccacagccaaacacagccaaggcaccaggaagttgcgttacatcacttccgctttccaggttggcctgcatctggttggtagaatttgtcctgtgtcctggattccagctgcaaagaaacctgggaaatgtagtgtgttttttttgttgttgttattgttttttttttttttttttgacagtctcactgtctcaaaagagtgcaaagtggtatcttattgtggttttggtttgtatttacctggtgagtacaacagtgtccattgagcactccgcagcctgactgcagagccacctgctgtgtagcatggacctccccatgcagtgggagacatggggtcaagtcctggctcgctctctggctgcattgggtgaccctgagcaagtgctgtactttcttttttctttttttttttttttttttaatgagacagaatttgctcttgttgcccaggctggagtgcaatggcgccatctcagctcactgcaacctccgcctcccaggttcaagcgattttcctttctcaccctcccgagtagctgggattacaggcatgcgccaccatgcctggctaatttttttgtatttttttagtagaaacgaggtttctccata[142 bp omitted]gctatcttccagggtagcctcgaggctaagatctgaatccatggccccttactgtctgctcctttcctctcctaaggactccagtgggggtgactcatgtgcttctgaggaggaaccaacctttgaccccggctatgaacctgactgggctgtcatcagcactgtgcggccacagctctgccactcagagcccacgagaggtaggctgaggtggcggcccttgagaagcacgtgtgggccaggtaggacacatcttgccctcagtggtcacggtcccaagggctttgctgcccacaatcaagaaggccaccagtcaccaccttccagtcccaggagcatggaagtgaatgggaagacaggactgtcccagcccaggtcaacatggccagtgtctctgagactgcagccttgctcatcctactgggctcccggattggctgtgggtgctcccacaccaggcctgcccctgaggttcgaggctggtggggtgacagatgcagccagttagggtgatttgcaccatcctggggtcacacagggtgcaggggacatccagagaaggcacgtgacccctctggggaatggagattccttccaggaagaggtgatgctggagcttggcactgagggactcttgggagttttctcttctggcagagagagcagcccgtgcaagccagaggcaggcggcccccgtgtgtttagggagccgctggcctttcattgtagctcaagtgtgggattttgagtgaagaaaggttggaggtaagataggcaggggcgaaggacagacccgaggggcctcgagtgccaggttgaggaatagggcccttaccctgcaggtcgaggggtgcctaggaaggttctggaaaggtacatgtccactgggcccccttcccatcttactcatttgtgcttccaaggaatgtgaggccaggggcagaggggtggcttgtggcggggccctcaggagatgcctgtgccgaaggaacatcctgggttgtggttgataaggctgactctggcttcccacgcgcttcccccaacacagtgccgtctccctaggtgcagagcccagctgcccccagggctcctgggccttctcagtgagtctgggggagctaaagtccatccgccgctccaagccaggcctcagctgggcctacctggttctggtgacccaggctggaggttccctgcccgcactgcacttccaccgcgggggcacccgcgccctgctccgcgtcctcagccgctacctgctgttggccaggtgagctctctcccagtgctgggccttaaaccgggcccagtcccaccatggctgcagcgtgacccctcggggctgtgaaagaaacacaactcacactgatttaaaggcaggcaaagagttgaccagcacatataactaaaaagtcaaaaaggagtattgatttcaggcaggacccaggtcccaaaatgttagaaacagttatcctttttccctctgagttcgttattctctggggccccagtatccgtggcttaacaacccggctggatagaaggcacctctttccccacgttccaacaagatcccagagctgcttctcattggctcgtccctgagtcagtcacactggaccggaaggtgaaaggccctcattggccagccccgagtcatgtgcccacccctgggatccagctgtgggcctcctttaacagcattccctgaaatgaggggttgcccaggggtggttgggacgctgcagctggaaccgatgtcggccgagcacagacagcctgggacactgggcccctacctgtgcatcacctgtgcgtcacctcccgcctcccagctccccgcaggactcccgcctctaccttgtcttcccccacgactcctctgctctctccaactccttccaccacctgcagctctttgaccaggacagctccaatgtggtgtcagtgagtgtccccagcaggaggcctggcgggtgtgggcagggagggacgagaaggggcgggccgtgacctccctttggcctcgtccccagcgcttcctccaggatccctactccaccaccttcagcagcttctcccgagtgaccaacttcttccggggtgccctgcagccacagcctgagggagccgcctccgaccttcccccgccacccgacgatgagcccgagcctggattcgaggtcatttcctgtgtgagtagtgagtggaccctccctgttatttctggccgtgtctccctgggcgcatgatttcatttccctgggcctcagtttcctctttggtaaaacggggatggtaatgggacaccctcagggggtgcatgaggaaagcgctcatggctctgccagacactgtgagcacctgctcacccttattgggggacccctcctaactgggggatgacttggctgctgagccccggaagaggctgctgcctgcccctgaatgttagtcatccgtcaagctaataagctctctgagcttgtggactgaggctgggttgggtccccccaccaccccgccgagccccaggctcatttgctctttgcctgcaggtggagctggggcctcggccaaccgtggagcggggccctccagttacagaggaggagtgggcacgccacgtgggccctgaaggtcgcctgcagcaggtccctgagctgaagaaccggatcttctcgggggtgagtgccaggacaggtggaagaatggggcagggccagaacaaggccccactgagctgcctgccctcctgcacccccagggtctgagccccagcctgcggcgcgaggcctggaagttcctcctagggtacctcagctgggaaggcacagctgaggagcacaaggcccacatacgcaagaaaacgtgagttctcaggaggccctgccctgccaggcatgacacctggtacctcctagggcaccaatgggcaagttctgtggacgctggttgtgaacctgctgtatctgggcaccatcctgcgcctgtggaatacggcaatgatcaagccagacccatcctcacccctgtatggtctgtctccattgcagttttcattcctgtgccatactgttttaatgatcacagttttgcagcatgttttataacctaggagggcccgtctctcctcattcctggtgtaggttatatacctgccaggcactgaggatgcagcagtgctggacgattccctgtccctggtgccctgtccagtggggggtgacaaattttcatcaaaaggccacaaggctatgtagtgagagatgccaggaaggtgaagtgtaagggatagtggcaagaatgacgaggtgacctgcttgggtctgtgtggtcagggaggggctctgcagggctgacctgggaggtggcgccaggcttggaggtctctgggtgttgcagacagtggcggcctcacatcttgtttccctctgtcactcagggatgagtatttccgcatgaagctgcagtggaaatctgtgagccctgagcaggagcggagaaactcacttctgcatggataccgcagcctcatcggtcagtgtcaggggtggcacttagggtggatgggagcagggaaccacaggagggcctcaggcataagtgcgagtgggagatagagggagccccctgcctccccaagaccagtgagagggcatcttgggggaaagctgcatgggctgttggggaatggccctgggggagcaaggccagggacaggatgggaaagaaggggagcccagctcccttcaggcccagtctcagttctgtcaatgcctggtgatcttggcaagtgattttgcctccctgggcctcagtttcccctactgtgggaggatatagccagctggtgagtgggaggcctggcgcctcacagcaggagcatcagtgatagtttctagaaccagctctgcttctcccccagagcaaaccccgaggctgggggctgccagcaggaggagcagtgggggctggcactggtggccagcagggatgggcccccctacctttctcacctttgcaccctgtgcccggtccccgcagaaagggatgtgagccgcactgacaggaccaacaagttctacgagggtcccgagaacccggggctgggcctgctgaacgatatcctcctcacctactgcatgtatcacttcgacctcggtgggtgccaggcctggggacgggcgtggccggggctgtccaggggagcgctgcgggcttggctgcagcctgaccccatgtccccccaggctacgtccagggcatgagtgatcttctctccccgatcctctacgtcattcagaacgaggtggatgctttctggtgtttctgtggcttcatggagctcgtggtgaggcttgggtcaggggtgggacacaggcctatcgagcgatcaggtgtcctggtacctcacggggtctgctctttcccccctccttccgtcccacagcaagggaactttgaagagagccaggagaccatgaagcggcaactcgggcgactgctgctgctcctgagggtgctggaccccctgctctgcgacttcctgggtatgtctctcgggagggtgggcaggagacaatggggccatagaccttgccagattctctggtagcagccacagtggcatcctggacattgggtcctgatccaaacaagagaaacatccccacacaacctagaatgtagaggcagaattgctgtttgaagcaaaacttcaccaaatgcagacacgcaggaatgctgactcaccccgtcctcatgctcacctagatcctgtttgggctttgcctttggcttaacctgcagggtatttttcagaaataaggacctaggcattcctgccacttcttatccccacctggctgtggctcaccttgaaccaggaatcagagactggttctctgggccctggggctgggggtgctgcatcccagctttaacatttttattcttcgaccaggcacagtggctcacacctgtaatcccagcactttgggaggccaaggcgggcggatcacttgaggtcaggagttcaagaccagcctgaccaacatggagaaactgtctctactaaaaatacaaaattagctgggcctggtggcacacgcctgtgatcccagctactcaggaggctgaggcaggagaatcgcttgaacctgggaggtggaggctgcagtgagccaagatcacaccatggcacttcagcctgggcaacaagagcgaaagaaactccatctcaaaaaaaaaaaaaaaaaaaaatatattctttattacttggtcaatgtaaaaactgcaggaaattaagatgaagaagaaaaagtaaggctgggtgtggtggttcatggttgtaatcccagtgctttgggaggccaaggtgggaggatcacgtgagccaaggagtttgagaccagcctgggcaacactgggagaccaaaaaaaattggg[132 bp omitted]tagcaaaactctgtttctactaaaaatacaaaaaaattagccagccgtggtggcgcccacctgtaatcccagctgttgggatcggctgaggcacaagaatcactcgaactggagtgggggaggtagcagtgagcagagattgtgccattgcactccagcctgggcaacagagtgagaccttgcctcaaaaaaaaaaaaaaaaaaaaaaaaggtcgggtgtggtggctcacgcctgtaatccagcactttgggaggcca[134 bp omitted]gagacaggagaatcacttgagccaaggttgcaccactgcattccagcctgggcgacagagcgagactttgtctcaaaaaaaaagaaaaaagaaagttaaagttgctgtttgatatcattgtttttcttgagtgcagatggtgatgataataagttaaacttattcatgaacatttcctcgatgctttaggacccccgggggagggagctgagatactctgtcctcaccttactgatgaggaaactaagccatagaaaagcatcacctcctagggcacaaggacagaggctgcctctgggtcattcaaagtcttctgaaacatcacttttcttgactgcgcggcattgtgtccacctgcaagatgtggtagatttgatgtaacttgacctgctggagattcgggtcctttgcagtttttcatcacggtgcatagtctgggtaatttcttctttaggttcacttccaagaagtggaattttgttcaggacagtgcttgttttcacacagctttggagagtttgtcctccgttgttactttcctcaaaggttagaatgctcagactctcactttcatttgagttaacttggggggaaaaaaaggttcaacaccagcttaattttttttttctttttgagatggagtctcgctctgttacccaggctggagtgcagtggtgtgatctcggctcactacaacctccacctcccgggttcaagcgattctcctgcctcagcctcccaaggagctggaattacaggggtgtggcaccatcccagctaatttttgtatttttagtagagatggggtttcaccacgttggccaggctgtatttttagtagagatggggttttaccatgttggcctggctggtctcgaactcctgacctcaggtgatccacccgcctcaccctcccaaagtgctggggttacaggcgtgcgccatcgcacccggccttcagcttaaatttttgctacagcgtatctaggagtgtcagttcccttagcgctcaccagcagcgggcagaggtctgtttcgtcgggcgtgctgggcgtcctgcctcccttccatgtccatggcagatgtggaagtataatagcacacttcctctggagagtgggaggaaggaggggcagggcccgcgttcagggctgctcctgcctcacctccgaggttccccagccaggcataagtcacttgcctagacttggggaaggtcttccagtcaggatgacttctcaaactctcagtcccagcgctgggcaaggctgagtgggctccatgtcatcccccagattcccaggactccggctctctctgcttctgtttccggtggctgctcatctggttcaagagggaattccccttcccggatgtccttcggctgtgggaggtgggccagccagtttgggcgagaggcctgaaggggtgggctcacctgccctgggaggttgggcggagagggacagaccctggtgggacctcaggcccaggctgggctatgacctccctccctccctctgtcccgcaccctcaggtgctgtggacagggctccctggccccaatctgcacctgctggtggcctgcgccatcctggacatggagagggacaccctcatgctgtccggcttcggctccaatgagatcctcaaggtgaggctccggccccgcccccgccctgtcccccctgagctgggcgctgcccagggccgcagtacctccggggagcaggtgtttagtgtgggattattgaaagcctggttagttgggagcgcagtgggggtggggccgcgtaggtttcccttctgccccatgccatgcctgctcccagcaaggtcctccgggcaggtgggtggggaccttccctccccgagtacgtgctcagaatgctcccggaggcctgagaagcatgtctcgcccagcgcacttctgagcccccagagggccagcccggtgtgtcttcattgtttcccagcacgaagcacagagtgggcgctcgggcggaggtggttgagtgccgactggcgcctgacccaccccctcccgcagcacatcaacgagctgactatgaagctgagcgtggaggacgtgctgacccgcgccgaggccctgcaccgccagctaaccgcctgccccgtgagtccccgtccgccccgcagcgccccgcccgaaccccgaccgacccccgcccccttctcaccttcaccttccgcttttcgcttctctcatcccgtgcctccaggagctgccccacaacgtgcaggagatcctggggctggccccgcccgcagagccccacagcccctcgcccaccgcctccccgctgcctctgtcgcccacccgggccccgcccaccccgccgccctccacggacacagccccgcagcccgacagcagcctggagatcctgcccgaggaggaggacgagggcgccgactcctaaccccgccaggcagcctcgttctgcacaggcactttagcccgagccaggcacacctgcgagggggcaggtgtgctccgccgccctgctgataagctggcttcattaaactgacacttctcatgtgcagttggcttcttgttggtggggggaaggctgccaagtgggctctgacctggttgaggaggggatggtggctgggcagagcctagggtgaatgattggggtttgtggaggcagggcttcctgagttgcctgatttgtttttttgtttgtttgttttatgagatggagtcttgctctgtcgcccaggctggagtgcagtggcagatctcggctaactgcagcctccgcctcccgggttcaagcaattaccctgcctcagcctcctgagtagctgggactacaggcgtgtgccaccacacccggctgatttttgtaattttggtagagatggggttccaccatgttgcccaggctggtcttgaactcccgacctcaggtgatctgcctgccttggcctcccaaagtgctggtattacaggcgtgagccaccgcgcccggcctgatttggggtttttggaagaggatagggtgctctgggctgtggcggcgacctggtagctgtgtgggaacacttcccggacataaccaaggtggaagggcctgcagagatgcactctggggagcctgccctcccagctgctgcttgtgagaaaaatcacctcctgttcagccactgtcagctgggctttctgttacttgcattagggcccatctggacttcagcctcgtgacagaggtggtcgctgtgattgccatttcccggtggtgcagggcgtccttccggttccctctgtgcgcaccaccccccaccctcctctggagccccactgtccaggaagaagtgaggggcagatttttgggggggctccaggatgggcgtggcgcctgctaactgcagggctagtggttccgatgcaggcaaactggggaagtaactgagccacgggggaggctggaccacacggctttttccgaaaatactttaatgcgaggtcctcgtgtgggtcgtgttttggagagataactggccttggactggagggtggctgccttcttcctttgccaggtcatgcgaggggctgctggccaccccatgcacatgcccctgcccctccatgtcagatgcgtgcccctcggggctggccgtgtccgatgcaggccccttccggctgttgatcttgatggcggcgcgcagcgccgacttgaccgccgtctccacccagccgtgcgggtaggcggtgtgctcgccggcaaagtagatgcggccataagggaccgtccagtcatccttttcggtttgccagagcgccggcggctgtaccacaaagccaccctggctgtgctggtcctccgcccaacgcttgacgacgccggtgccgtcccagagctggcgcacgacaggcccgtgcaatgccgccacgtcgtcgagcgccaagcgcaacgcctcttcccggctcaagccggcgaacgctgccgccgcgtccgaccacgtgtacgaggccagcagcagcgcgccctcgcgcggcggcgggtagaaaatcatgcgcgacgggcgatcggtgtttgagtggccgccttcaatgtgctcctcgcgccagaagggcctgcggaagcttaggaacaccttggtggccggcacgtagtgcagcctccgcagcgcctcctgcatgtggcggggcagcggcggcgagaaggtgatgcgcttcaccgccggtccgctcgccgtcagcagcaccacgtcggccttcagcaccttcagattccgcgccgggggagaggtctcgatctgcacgtgcacatcgtgcggtccctgggtcatcgccaccacgggcgcgttcaacagcacaagcccggacagcgagctcagcagcgcgcgcggcagcaggtcccagccacccacgatgcggctgtacctgcaggcggggcggggcggggtgggggcgtgacctgggctctgcggccctgcccctctgccttgccccacccaccccggcagctggcccttatgggcaccggcccgctcccccgtcatccacctctcccgaccccgcccgtccctgacatcccaaaggccgcaggagtagtggattgtgtcaccagggaccccaccacttctcccctaggccgtgtcctttatctgggaacccttagccccgcgaccatcaattaggccacgcccttcacaacagccccgcccccagacccagaggctcctcccactccctgctactttccctgattgccccccgccccccccccctgcccgccagccccgccccttactggagtctgtcgctgaggcagctgtgggcccggagggcctcggcgaagctgagatagaagaagccatcctcggacatcacgtctcccagaagctgcacggccggccggctcaggttcccctccccgagaagatattcctgcaggttgggcacaggccgaggttagggcccaggcaggctgcacccctgagagagcccctccgcagctgggcctcctggtcccatgacatgtccttggaccgtaggatcctgtccccactctctgacagatgagggaaacggaggtccagacagggggcgtgtccagcccccgggtcaggcaggaaggcggtggcaggactagggtgccaggtacccgccttctgactctctggggaaggcctcatggtcactctctttgccctgcatctcagcagaaccaagatccccacttaccaagagcgtgtgcctttcaaacttcttcatcgcctttctgcagcccagtgccttgaggtctttgagggcctgttgtggaagaagcagacatggtgctgagctgcccgggcagccagggtggaggccgggcctggagcccacactcggcttctcctcgtggttctgcccacggctggccattcaccactctcaagcccctgggcttttgcccacaccatgccctccgccttgccctccacggcaactcagatgccactgctcctccgatattaccgaactgttaacgccgcccatcccccctcattcggctggcccggctggtcacagctcatcccggttgcgtgttattttgcctatttttcagccagccagccagactgtgagctccatggaggcagggatgtgggcagctggagaggagactgggagagggtcccaggcgtgctgtgtcctcccgggggctcagtgattatttgttgcctgaatcactgtggccacggacagaagctggtcccctgtgccactggtcagtgctgacagggcatgatggctgagaagtttatctaccgtccgtcccctgcccacagccctcctgtagctccccagtgcctggagccacagaattcttgcccctcagcctcatgttcaaggcccctgctagcccctcaatgtcttttttttttttttttttttttgagatggagtgtcgctctgttgcccaggctggagtgcagtggcgccatctcagctcactgaaacctctgcctcccaggttcaagtgattctcccacctcaccctcccaagtagctgggattacaggcgcctgccaccacacctggctcatttttgcatttttagtagagacagggtttc[142 bp omitted]ctctctttgccctgaatctcagcagaaccaagatccccacttacctcagtccatgtcttttatggcagctctggttctgtgaacagtgtacagtgcccagaccacctgccctcagggctctcccacctacacatctggcacctattgtttccctgcctgtctttgcgtggcacatgagtgcgtgttcttcagcactttgttcgaatctcaccccctcccagaagccttgctgcccccatctaatttcagccttcttcttggtccacctggcttcccccttctggccaggacctcagagggaaggcagtgccccttcactcactcatgcatctcgcatctctcagactcccaaaccagtcagtgtcaaggcatagaaatgacctggacatggcccccatcctggtctagaaggggagatgggcaagtgggctctgacctgggtggggaggggatgttgggtgtggccagttcctccctaaaggtatcagggaaggcttcctggaggaggggacattggagctagttcttgagggctgagcaggagttcctgtgtggggaagggaaaggcattctggaaagggagggtgatacacaggtatagtgggtgtgaggaacacagagctgggggcatgtggaccaccatgaggacaaaaatttcttagaggagaaaagagcatgaggctggaggggtgcagaagggaaggccagtcagggctcaaagctgagcctgaaaagatcagactttgtcctggaggcagcggggagccactgggggctgtgagcagcatcactctgggtgtgtgggaagacgtttctggtaccaggctggggagactagagcctgggcagcttgagaggaggctgggggagggtccagggcagaggaggaggcctgagctggggcaggcagaggggagcagggcacaagcgtcaggcggcaggggtgggcactgatggtgggggaggtgggcgaggaggaggtcaggaggaggatggctcctaggggtctgcccgtgactgcgggatggtggggccatcgtgagatgggggcaccgggaggaggaacaggtttaggggaagcttctgagcccagtgtcctggggagggacacagatcagggtctcgggaggcagatgtctccatcagcccatggatctatgtttaagccagaggtggagactggggaggttatccaggacagtgtgtgggtgaaaggggaagaggccaaaagctgatgcagctttggg[136 bp omitted]tggtgaaaccccgtctctattaaaaatacaaaaattagctgggcgtggtggcgggcgcctgtaatcccagctactcgggaggctgaggcagagaattgcttgaacctgggaggcggaggttgcagtgagctgaaatggcgccattgcactccagcctgggtgacagagtaagactccatctcaaaaaaaaaaaaaaaaaaaaaaaaaagaagggagttgagagatgacccatatgtgtagaagcccctgggctggcccattctcattctcggatttcagtgagtaggtcagtggttagacctcatggcacacatccccttggtagaatttccatctccaccaacaggcgccccaccccatggaggggactgaagggatgccagagagaagaaaagccgggccggggcgagcttaggaggaggacagagaagtcagggcgggaggagggtgcaggcggtacccacctggttgagagccatctggtagatgtcttcgggcgagtggcccttttcctggggacgcaaggcgtagcccagcttctcgggcaccttctccaccacatagttgcgcagcttcacttcgtgcacctccgtccacgtgttcttgtcgtactgggtgaacttggtcaggttgagccccaggccctggcagagcttgtggaggatcctgatcaggggagtgggtgagtgagggccgggctccagtgggggtggcctggtccctagtgggacttggagaagaggggtgggaggggagagtagctggggaccagcatgaggctgggggtggggctagatttggggtaatcaatgctgggggatgggaatgaaatggggacaaggctggaggcctcagggcagtaccaggattaggattgggttaagagtgggatagagcccagattagaattgggaagggggacagagtttgggttggacgggggtttgagatgaagaaggggcctggggctggggtgcctgagggtgtggggatggtggagctgcaggcctggaggggccagcacaggagctggcttttgcaccaggcagggccagctggaggtctggttggaccaggtggcccgagtgttgccagaggcccagggctggcgctggaggcaagactgaggtgaggattaggcgaaggatggggttggaggctgggtttgggagtcagagtggaagttcgggcccactctggtgtgggcatggagctggggggctagttgagtctaggcacacaggtgggtgggttgctaggtcacctgtgagagctgggcatgcgcatggctcccagctccccaatccagcccgtgttctggtcccggtaggtgaagatgcggcccccgatcctgttatctgcctccaggatggtgacctgagggagtccgtggggcgaggagggcccttcagctccacccactgaccatcccctgccctctaccaccccgtgccagccccctgccttcttccatccccacagtggcccagacccagactaggagagggtccccttctgtatggaggtgggggaacagaactgagtgagcagttccagactgcaggaggaaggctgccagctagactgcaaagggacttcccagctcggggagttcggagatgacccatatgcgtagaagcccctgggctggcccattctcattctcggattgcagtgagtaggtcagtggttagacctcagggcacacatccccttggtagagtttccctctccaccaacaggcgccccaccccaggacagaggagctttgagccagtgagacttccctctgggatgaaaaacgtgggacaggaaagtctggggcctctcagtggagacatgtgacagcagggggcttgggcctcacccccagactacagggaaagatagcctctccccccacatccccacctccaccccctcaaggaggaacgcggccgtgtccctgtgcccagggactccagcctgcagcaggagggactccaggtagactgcaagcagtgcttcccaccttgtgtccagcatcgctgagcaccttggcggccaccagcccggccacaccagcgccaaccacaatcaccctctggggcttcagggtccgattgagcccccaggtcaccaccttgagcagctgctcatagtcaggatcctgcatgcatttctcgaaggggtcttggctgcgttcagccttccagtcctgggaggccaccaggctgaggaggatggggacgaggacgaggaggtgcagggctgggaggaggaggacagggtcaacggggttgtggcaggtcgggggagaggggttctactcacttgttccagagcccctcccctgcttactcacccaatggggccatgactctcggtgggagatggtgtctggggtggaggagaagggagggctgttgtgactgaggcctgtgaccactgtagcctgactctgtctcccatgggctgcccagctgctagagccggccctcccccagtcactgtcctgctctctggacctgtgtcccctaaccccattccttcagagtcccctggaccgtccctgcctccctcctcaccggtctccacctctgccacagctctctcgggttcctgtctctttctcttcttttccctctttctttcctttctttcttttttttttaacagtctttctctgccatccaggctggagtgcagtggtaagatcttggctcactgcaacctccgcctcccaggttcaagaatcctcccacttcagcctcccaagtaactgggattacagacacccataaccaaacctggctaatttttgtatttttagtagagacggggtttcgccatgttggccaggctggtctcgaactcctgaccttaggtgatccacccacctcggcctcccaaagtgctgggattccaggcatgagcccccgcgcccggcctcttttccctcttcctcatctccccagctcctgactgcttctcagtccctatttctgtgggtcctgtctctctgtccccccaccactggccgtgtcactacctccagctcttggtgacagcaggacagcgcggtcctctccactgccctccactgtctctgctgtggccctttctctccccttaaactggcagagccccgcccacccctccttttgggaaactggccgagggaaatgaaactggtttcctggagctgctctggtccaatgctcagagtctagttgaggttggagaaagggggttggaggaagttaatcagtctattcacttccttttgccccagatagttctggggtggtttggaggccagaaatagatgctcaggtaaccgtgccaacaacggggaatccccttcggtttgcccccgtccctgatcaccaggccacttgtttctatcctcccctgcactctctctgcctccttgattcccacggggacagaggggctacaggtccctgggccaggccaactttcccctccaagtccctctccgtcaggtgtcgccatgtcctgcagggccccccatggttccacttccctctccacttgccacccagagcctcagtctccccctccgttacatgggtgtagcagtggggctggcagccgtggtcccggggtcaggacgtgggctctgagcccgccctcccctctgtggctctcgtctacagctgtcaaatgacgtctacagacgtcacagtgttttaggatcaagtgagtgaatccaggttaagttctgtggccggaacctggggtagtactggaagctgctcctttggaaatgccagctgctgtggccgcaggggcactcaggggttctatgagtgaccacccggcagagggaagcgcccaggcttcacccatccctgctttaagaaccacctcagtgctcagggcagggagtggggcggcaccttggagtgggtgggggtggagaaacaatagcagggactttccttggggtgggggagagggagccaggggctccgtgaggaggaaaaccagagggaggcagattctctgcagcaagggttgggtgggggttggagggcattaacaagaaggaagatgggaaactcccgcagtaaatcaaagagggatgcggttatggccgggaggggctggggggtgaatgtgagtaacaaggcatgtgacgcaggggcgggaggccgtggcaaagggaaatgatcaaagagctggagagttcagggaccgaaagagcttgggtcagcaaaaatagtgacgagggccaggggtggctcacgcctataatcccagcactttgggaggtcgaggcaggcggatcacctgatgtcaggagttcaagaccagcctggccaacatggcaaaacctcgtctctactaaaaatataaaaattagccgggcatggtggcatacgcctgtagtcccaactactcaggaggctgggacaggagaattgcttgaacccaagaggtggaggttgcagtgagctgagatcgtgccactgcactctagcctgggtgacagagccagactccatctcaaaaaataaaaaataaaaataaaaaatagtaatgagggccgggtgcggaggctcactgctgtaatcctagcactttgggaggccgaggtgggaggattgcttgagcccaggggctcgagaccagcctggccaagatggcgaaaccctttctctaaaaaagaaaaaaatagtgacaaaaatgttcccatggcgatcacctgccttggaggccgcctggtgctcagggctttgcacccatcgtaagcctcacaatgcctgcatttgaggccaggcacagtggcttacgcctgtaatcccagcactttgggaggctgaggtgggcggatcacttgaggtcaggagttcaagaccaacctggccaaaatgatgaaaccctgtctctaccaaaaatataaaaaattagccaggcgtggtggtgcacacctgtaatcccaactactcgggacactgaggcaggagaatcgcttgaacccgggaggcagaggttgcagtgagccgagattgcaccgctgcactccagcctgggggacagagtgagactccgtctcaaaaacaaacaaacaaacaaacaaaaaaccaacaacaatgcctgcatttgatagttgaggaaactgaggcttggagatggcgagagggtgggacaggaggaccctggggcacagagaggggaaaaggcttggcctaggtctcagagtttcattcacagcgacatgtcaagtatgaacgcggcgggattggggccttattcgcctgtgcctcgacctgggtcccacagtggggaatggcagtgctggcattcctcaccaggtcgggtgggccccaggtccccggcccctgcccaatagcttgttcagtcctacagccgcataacagtggaaacaaccatggaaaggtgtggaggcccacagccaactggctcccagggcatgtcccaggagtttttgggtccccagagtgggtggggccctgcaccaatccccttgtccttatcacagagggttgttgcacaaaactcctctggccccaggcatatgtgcagctcaccttgggggacttctgggtggttgttgttgttgttttgagagatggggtcttgctgtgtcactcaggctagagcacagtggcacaatctcggctcactgcagcctcaacctcccgggctcaagcaatcctcccacctcagcctccctagtagctgggactacaggagtgcactaccacacctgttttttgttttttttgttttttttaattgagacggagtctcactctgtcacccaggctggagtgtagtggcgctatcttggctcactgcaagctccacctcctgggttcacgccattctcctgcctcagcctccagagtagctgggactacaggcacctgccaccacgtccggctaatttttgtatttttagtagagatgagatttcaccgtgttagccaggatggtctcaatctcctgactttgtgatctgcccgcctcggcctcccaaagtcctgggattacaggcgtgagccacctcgcccggccacacctggctaatttctgtgctgtttgtagagatgggattttgttatgctgcccaggctggtcttgaactcctgggcttaagcgatcctccagcctcagtctctcgagtagctgggaccacaggtgcacaccaccatgcacagctaaatttttgtactttttcatagcgacggggccttgctatgttgcccagcctggtctcaaactcctgggctcaggtgatctacctgccttggcctcccagagtgctgggattacaagcatgagccactatgcccggcccctttgagcttttttgtgcatttcacatcatcttcattcagcatgtattacttttgtaattaaagaaaaaaaaatcccaattaatgttagtttgaagcaatacatcagacaggccaggtgcccccagtgaagagcagagggcgcaagtcagctggttcaggattgatgcctttccagaatgctctgtcgcccaggctggagtacagtggtgtgatctcagttcactgtggcctctgcctcctgggttcaagtgattctcctgcctcagcctccccagtagctgggattacaggtgcgcgcaccaccacgctcagctaatttttatatttttagtagagacggggtttctccatgttggacaggctggtcttgaagtcctgacctcaggtgatccacccacctgggcctcccaaagtgctgggattacaagtgtgagccaccatgcccagcctccagaatcatttctgataatactaaggagattggtgttcaggttaaattaggtttagggatgagggtggaattagggaaaagcagtttggataggtgagtgggagacaggagggaggggaggggcaggtggagggagcggaggggaggaaaggcccagtcaagtatctgttgacttcagctggtttgggggtattctggttttttgatggagtttctggaaaataaggttaatcctcccagataatggtctttggtggggcaaatcctaccttatttggttgacttctagaaccacaatgatggtttcgatgaggtttaggtcatgtctatacagcagccagacacctggccctggccccactgggggcctcgtggcccatcagggcagctgatgctgatgagggctgcacagatgtgctggggaccgggcccctgccttacgtatatacgcattctcttctctgagtctgtccaaagaccctaagtggtcagtattaaaagtttcattggccagacgcggtggctcactcctgtcatcacagcactttgggaggccgaggtgggcgggcagatcacgagatcaggagttcgagaccagcctggccaacatggtgaaaccctgtctctactaaaaatacaaaaaaattagccgggcgtggtggcgggcatctgtaatcccagctactcaggatcctgaggcgggagaatcgctcgagcctgggaggcagaggttgcggtgagccgagaccgcgccattccactccagcctgggctacagagcgagactctgtctcaaaaacaaaacaaaacaaaacaaacacaaaactttcaccaaggcttgggtgggcagggcctgcccaggggatgacctgggacctgggtgggagtcagggggtccaggcccagattggggaagggactcagggatcggaggacagaattagtgagtcccccaatctttggcctgaccccaggacagggtcccccttcccatggaaccctccttcctgtttccagaacatcccagggccccgggtgggggcactcactgcatggctgcctctggggggctctctcagcacccatggcctttatggttagcccaggacagaagtcatcgttgggcatgtgcggaatcaaggtgaatgatggtggctttgtccttgttagtggtgcccttgttagatcagagatgccaagttcctgatattggggtcagagcagctgggaggctgtgaaaggcaggtccccctttctcagaagtgttttattatggaaactttcaaacatctaaaaccagagtgagcaggggataaacccaggtgaattcatggcttcacacagcccttgtctcactcaccctccccgccctctcactggatttattttagagcaagtcccaggcaccatattgtcttctgattttttgggactgagtctcgttctgtcacccaggccggagtgcagtggcacaatctcagctcactgcaacctccacctcctgggttcaagtggttctcctgcctcagcctcccgaggagctgcgattacaggtacaggccaccatgcccagctaattttcgtatttttagtagagacagggtttcaccatgttggctgggctggtctcgaactcctgacttcgggtgatccctcccatcttggcctcccaaagtgctgggattacaaggctgagccactgcacctgaccatgttttgctttttaaaaactacaatatcattatcatattttaagatggcagccatttcttttttttttttttttttgagatggagtctcgctcagttgcccaggctggagtgcagtggcacgatctcggctcactgcaagctccggatggcagccatttcttaatatcattaaatcaatgttcacgtttcctggaatagctcatcactgaaaaacaaaacaaaacaaaacaaaaaaacagtttaggccgggcatggtggctgacacctgcaatcacagtactttgggaggccgaggtgagcggatcacctgaggtcaggagctcaagaccagcctgggcaacatggtgaaaccccatctctactaaaaatacaaaaattagccaggcgtggtggcgggcacctctgtaatcccagctactcaggaggctgaggcaggagaatcacttgaacctgggaggcagaggtcgctatgagttgagatcatgccactccagcctaggcgacagagcgggactgcatctcaaaaaaaaaaggccaggtgtggtggctcatgcctgtaatcccagcactctgggaggccgagacaggtggatcacaaggtcaggagatcaagaccatcctggccaacatggtaaaaccctgtctctactaaaaatacgaaaattagctgggtgtggtagtgcacgcctgtagtcccagctactcaggaggctgaggcaggagaatcgcttgaacccgggaggcagagattgcagtgagccgagatcacaccactgcacgccagcctgagcaacagagcaggactctctgaaaaaaaaaacaacaacaaaacaaaaaacggttggtttgtcaagatgcaaatcacagtccatattgcatttgagtgacattgtcttggtcagtaagtgtcactatcagttctgtggattcaagggaactagggtatctgaggtgaccccagggcaccaggctagtccccatcacggcagcgcacccggtctgcttcttgcctcgggaaacctttggcgtctgagagggttcaacctgatggtgtctggaggggagacgggacaagggcgcccatgtgggtcactgtgtttgaagtcaccagggccctggtgtgcagaagccaagggtgtggtcctgtgggacaggcaggggaacagccggggtcactgaaacctggctggggggctggctgctgtgcaagaagcagacctcgcttccgagcgtgagggctttgctccctgggaggttctgtggagagccgctgccctgagtctgaggggcagatttttaaagcaccctgacatttttggggtttactgaaaacttgggagcagtggtgtgctgaagctgagtcataccaggtcataagagctgatttacattttcaggagtttttgctttgcaagccactcattactaaaaaataaattgtattgatgattagtttttactaaaaaagaataaaaagtc[132 bp omitted]actgcaatgtctgcctcccaggttcatgtgatcctcccacctcagcctccaagtatctgaaactacaggcaggagccactacgccaggctaatttttgtatttttgtagagacgaggtttcgccatgttgcccaggctggtctcaaactccagaccccaagtaatctactccccttggcctccccaaaatgtcgggattacaggcatgagccaccacacccagcccccatttgccactcttatccctaaacaggggaaagcaaagcagtaagagctgagattcacctttaaaagcctctgattccaaatttagtcaccaaatgtgttgtcttcatatgaattaatgaggaacttaaggaaaggccatttgtcaggactgggaaggaagcacatctgtgtattttcttcctggaaagggaaactgaaattacgatggagccatcacccgcggtggcacccagtcggttgctgatgctgctgcgatctcgggatccctcctagactcccccaggaggcctgttgggaccatttctcacatggctttggggcacagagcctcctgatttaatggaatcacttgtgttattcagagtggggtgctcaagatcctttggggtatgggaagaaaatgcagaacttaaaattttttttttgagatgaagtctaactttgttgcccaggctggagtgcagtggcgcgatcttggctcactgcaacctccgcctcccaggttcaagtgattctcctgagtacctgggagttacaggcacccaccaccacgccgggctaatttttgtattatttatttacttatttgagacggagtcactcttttgcccaggctggagtgcagtggcttgatctctgctcactgtaagctccgcctcccgggttcatgccattctcctgcctcagtctcccgagtagctgggactataggcgcctgccaccacacccggctaatttttttatatttttagtagagacagggtttcaccgtgttagccaggatggtctcgatctcctaacctcgtgatccgcccaccttggcctcccaaagggctgggattacaggcatgagccaccgtgcccagcccctaatttttgtatttttagaagatacggggtttcaccatgttggccaggctggtctcaaactcctgacctcaggtgatccacccgcctcggcctcccaaagctggaatttattttaaaaatataactataagaaagcaattaagctttgctaatggttaatatacaaaataggaaataatatgcaaaataataggaaaaatatacatgtacactttggaaatacatgctcaaattttctcatcatgattgtgtggcccctgccaacgaccttgtgggcattttttggtacctccagcaccagatcaggatcagctctaaaaatggatgctgaacgcacaaatgtaggtaaaatgcaaactgcttcctacctcctaaggggactcaaggcctcccttccggcagaggggacaatatgagtcaaggcctatgaactgcaggaaaaggtccctgctgtaggtgacagctttcagagagaagtagctgggttgtggggtcttcctctggtttactgctcccaccacacacacccatggtttctacttagacacaactcttgtcctccagagcccaagatggtgcaaggaaattttatttatttatttgagacgaagtttcgcttttgttgcctaggctggagtgcaatggcatgatctcggctcactgcaacctccacctctcgggttcaagcgattctcctgccacagcctcccgagtagctgggattacaggcgcccgccacttaactagccaccagctcatgtttgtatttttggtagagatgggatttctccatgttggccatgctggtctcgaactcctgacctcaggtgttctgccagccttggcctcccaaagtgctgggattacaggtgtgagccaccgcacctggccggtccaaggaaataatgactcatgatcatgacttcgggagacttttggaacctgggccatgaatctcccaagtgttgcccacagactgagatggaacaggcagcaggaggccaaaggggtacactccactccccacagcccaggagatctgagtgcttaggaccattccagtccatagagcgaggctggagggtggaggaagagcattgggcccgtgtctttagccccaggtgacaggaaggaatgctgcccatgacatctgtaaccactggaatagcgccttagggatggtactagatgacttaacatgtgtgtatattttttgagacagagtcttgctctgtcgcccaggctggagtgcagtggtgtgatcatggctcactgcagcctcaaaggcctgggcttaaatgatccttccatctcagcctcccaggtagctgggaccacagttgcgtgccaccacgcacaaccaaacttttttgtagtttttatagagacggggtttcaccatgttgcccaggctggtcttgaatccctgacctcaagtgatctgcccatcttggcctcccaaagtgctgggattacaggtgtgagccacctcgcccagccatatttgtgtatattctacgacataactgtcacaaaacacctggagcccactccccgtggcggcttcactcgtgtgttcctcttctaccactagcaccaccccttcctggagcaaaccacgatttgcatttgtctattactctgtctcatcaaacaaaagctgcttcatcgcatacccctatgtctatgcaagcactacttcatttgcttgcctgtgcgtttcatgtgaatggcacccctgcagagtctcctggaacctgctctttttactcagctttctcctcctaacatttatccatattaacagcagctgttttggtttcacaatacatttatttagaaaagcaacatacagtaataggtatttcagagaattcagcaaagtataaagacaaatacaaaagatgcttgggatacaaccgctagcttctgccttccacacacagtggattttactgtaactgactagagttactctggtgccactaagttccgagccaagtctacggccaccactggaagctgtggctatttctgtggactgacgttacactgggcttcattgttctttcatttaacaaatgtgacagggaccgggctggggacacacggggaacgacagtgggtctctgcccatgggaactcacaatctaacagcgagacgaggcacaaacggctagcacaggatagcataacaagtgccacccaaggtacaggctcagggtgctacggggacctgcaagaaggccacctgagcttcgggtagctgggaaggcttcctggaggaggtgaggcccaaggtgggggtgagcctgggccaggcaaaaggcaggcctctcggcgcccatctgtggttcctcaacaccctgtgtgtgcaggcccctcagctgacctgtcttctgtgaaattcttgatcccgctctgttctattcacactgtgctgctttgccttggtggttagcatggttagctttca[134 bp omitted]tcctgggttcaagtgattctcctgcctcagc[134 bp omitted]tggccacccaaagtgctgagattacaggggtgagccactgcgccctgacttggaggttctcttacatttggtattttttcatgacacctatgactatgctttggagagagtggctgcccccacgaccctggctgggaccaagaccatcagcacttctccatcaccaggctgagccaggatgaggtgggtggtcgcagtaggtgaaaaggggccaaagatactcaaatgaaagccacagaagccacacccatgaggctgctgcctgggcagaaggcccagaataccctcctaaatggaaaaacgcaaagcacacagcgatcatgtcaagggcagtcatgtgaaagaaagaaacaaacaaacaagtatcttgccacaaccccaaactacagacaacagggcgcattcccctcatgaactccctagggacctgcgggccccagggctgctgtcgctcagtcaaaggtgatccggaagctgcgctcctgctccttgcgccggccctcgcacaccttggtcacctcctccaccttcctctgcagcagggccgagttctggtcgatccactgcagtgagtccatgtgcgcattgaggatcttgcagatctgctgcagtgggtcactggtgtcggcgggggccccggacgtgttcaggtgctcgatgatgtccttgagatcctgggccatgcgcttgagctgtgcatcgatgttctcagccagcttgtaggttttctcacgctcctcatccgcgtgctgcaggtagatggtcccgctctgctccttgaccaactcctccagtgggctcagcaggtcttccagctccttctgctgggacaggatgaagtcgagctcctggtccagcctcttctggtccagcttcaccttctccacctcgcggtgcaggctggtgatcttttctccattctcgatcagcgtgcggtcccaggcgttgacctgggtggcctgctggaggaagtgccgctcctggtcctctagctccaggctccatttgttgatcaggctctccagctgcgcgtaggtcatggcggagctggcagccgcccctgcagctgcgccagggccaggtggagcggtcacggcagctgctgtattgctggggatcccggctggcgccagtggttttaaattcaaggcaaagccggtggtgctgctgctgctggtggtggtggcggtggcggtggcagcggtggatgttgttgtggaggtgccggaagctgctccaggtgcctttaagctgaagccctgtgtcccagcagtgggggcgcccgctgtggtcacaggggtacagagggagagtccagtggtggcagatgaggttggagcagttgctattgacgcaaagaggctgggcccagtgctggtgatggtggctgtgggtgtgggagcagctggctgtgtggcacctgctgtggtggctgctggcgtggccggagtgaagggcaacgtggcaggtgccgtgggctgggctgaattccctgctgagccaatgttgaaaccggagggttgggccgtgcttccaccagtgaatgagaagcctccagatgtggtagctggagccacagaggtggtggaggggccaaacacaaagccggtgggtgctgtgccctggctggaggtgacggtgctcgatatggcattagtgaggttgctgctgcccagcccaaagccgctggggtttgccatggctggggtggcagctgtgttgctcaagttgagctttgaagcaccgatccccaaagaaaatccagttccccccgaagcaagagtcgctgttccaaaagtgaagcctgtcgtctgtgtggccggagtctgggtggcaagtgagaacaggccggtggaaggggtacttgtggctggttggaagggagccccaaaattaaaccctccagtgccagaggtggagaaagaaaaccctgtagcaggtgtggttgttgccgtctttgcagtgccaaacgtgaacccgcctgtaggggccccagtgcctccaaaattaaacccgctcatggctccggactctggtggcggcagctactctggctcccaaagcaaatccgtcggtgtctgcagccttgggaagatttctaaagcagaggaagtgacattgtcagatggcagttttggaaaggcaagctcagtggcatgactgggcacagtcggtttggagggtggtgggatgggataatgatgcatgctgtgtaacctaaactaggctctgctacatcgagaaggatccagaagcacaaaagcacgccccaggggtcaggtacgaggagccggggtgctagggacgtgcgtggccatgttcagcccagtggaaagctcccactctgtggaggacgaggcgggagaacaggaccttggacccacctcagcctgaggagatcagatttgaggcactgccacaagcgggactaggacacacaagaacagctgtaggacctgctcccagcgtgggacccagtgaggttccctggctgactctagcagggtgtgagcggatcagctcttgccaccctgagggcctctctggacctcagagagagagatggggccgggaacccaggctggatggcagggtctgggttgctgaaggccccccaggcccacacctgcactctctaagagcaggagaggacactggaactcctcctcctaactcaggggagggtctgaaacccatgtgctcagagcacagatgcccctggctgcagtgattggctcaaggataaactgagacctgagccaggcaatcggagcctcccctggggttttctccaggcttggaaggcagctgcctccttcacctgtaggtgtggtgtggaggattgcacctgggcctcccttggacaccttctcaaccatctgcagacactgggacatcacgggagaccatgagccccaccagagatgggtgggggtgggggtgggggagggataaagagcaccccagaagacccatgggccacagtatttccattcagttcaaactgacttgattttggtaatgtctaactgaaaaatctcccagtggtgccatctatcagcaggaaggtcaaaggttacctggtgaggaaagggtgagagggagtgctgaataggggtggtttctttttcttttgggaaagggtttttttctgtcatactagctggaatgcagtgacatgatcacaactcactgcagcctcaacctcctggacccaagtgatcctcccacctcagcctcccagagtagctaggactacaggtgcatgccaccatgcgtggataatcttttttattttttgtggaaatgggatctcactctgttgccctggtcttcaactcctgggctcaagcgatcctccctctttgtcctctcaaagtgccaggactacaggcgtgagccctaaagatgatcagcagtatccttagaagacggatttgactgactggagaagggaagaaagcttgtggtgacacgagcagactggagtgatgcgctttggaatctgaagatgtgagaaagccaggagccaaggaaggcagaagcagctctaaaagctggaaatggaaagagggaggccctgtctcaaaaaaacaaaagaataatcaaagtcaagactgagaagccaagtgcctgacccagagaaacacccacgaggtctgtttcctcttccctctctccaggccagtttttaaattgcttggtgtctgtcctcaggaaatccccttccagcttgagtaagaggcaacctatctcactacccccaccccttccactgcacccttctgcttcctcacaggcccctaagttttgtttcgtctgctcctccttctccacacagccaagcaagcctggggagatgaccccagggccagctgcacacgctctgccttgtctaagccagtagatctcaatgggcgtccatcactactgactgggagcattcaaaatacacaaggctgttagctccactaagccagtctctccggggctgggatgctgtggccctggcattttcataaagctttcctgggggattctgagaaaggtctcttcaagaggccacggcaagtgcctgagcccccaggactgctggggcctggcccggcctacatccattcctcccgttgtgggacagaacaaaagtcctcactgctgagccacctcaagccggtgtgttgttactggcagctaaaggcatctgagcagctacacctacacatctcagttctcaagaactcagcttaaaaaagcttttgctattaataagttgtagctaaaatttccaagaagagcatttataaaaagctctttgcaactatgaaaaaactacaaggaaaacaatcttctatggggacttgtctggcttaacagttcaccttttttttttttttttttttgagacgggagtctcgctctgttgcccaggctggagtggaatggcatgatctcggctcactgcaacctccgcttcccgggttcaagcgattctctcgcctcagcttccaagtagctgggattacaggcgcatgccaccacgcccggctaatttttgtatttttagtagagatggggtttctccatgttggccaggctggtcttgaactcctgacctcaggtgatccgcttgcctcggcctcccaaagtgttgggattacaggcatgagccactgcgcccggccaacagttcaccatttattaagtgccacattggtttccaatactcaggtgccagggatctattcacaatggtga[137 bp omitted]catagcgagatgctgtctctacacaaaaaacacaaaaatgagttggccgtggtggcaggcgcctgtagtcgcagctacctgggaggctgagatgggaggatcactggagcccagggaggtggaggctgcagtgagctgtgattgtgccactcactccagcctgggcaacagagtgagaccccatctaaaaaagaaagaaaggagacctaccattactcaccgtttcctcaaagcaaactttggggcagatccacttgacaaatgaggaaagtgaagcccagagtggctggttaagccacggtccctgccctcaaggcagccagagtcaaatgtcagctctacaaccagggctcagggcaggcacagggccgggccacatgctgtgggagcaggttccagggagaagctgagcgttgcagatgcagcatcagccagggaaaggatggcgggggagaggcgccgtccacgcgggaggaaaggcctgtgtgaagacagggaggcccacacagcagacatgcctctgggtgctaagtgatctggtgcttctgaagggagatgtttatgtgtgaaggagtgacttggcaagcctgggctgttcaaatctgcacattccaaagagagaaaatggcccttgaccagctccaggagaatctctatgttcttgaaatgtgctgccagataagagcgcctttgtttacctggggccccaggccactctagagagtccatgttgacgctgtgacctagagtgggggctttgggtcatacagtatcagcacgacctctggaggggctggagtcagcagacctcagttcagccacacgggtgcgccatgtcctccccacaacccgggccgccactgctccgtaagcgttaccacacgctgttgcagggagaactgagcactgtccgcgggactctctctacctgcagaggagagctggaagctcgtgcctggtctcccttggggcttttgcatctctcccctttgctgttttcagtctgtatcatttctccataataaaccgtgaccgtgactgtgagtagaaagctttgctgagctctgtgagtcttagctcatcactgagccgcagggtggtcttggggactgtgggccacgtgacaggcgggagaatctggcagacccatacataccatgctaacggttcgggcgttatattgagggagccacaggcggactttatgggtgtgggggatgaaccgtaggggtagaggctggaggccaggtggcttagagaagactgggagaaggtccaggccaagagcctgaggcccgaactggaactcagagaggacagcatcacaatttgagcaaagtgttaaatttgcaccaaaaccacagggtctgtccaggttaacagtgacaggccaggcatgatggctcacacctgtaatcccagtactttcggaggccaaggcaggaggattgcttaagcccaggagtttgaggcaaaaaacaaaaaacaaaaagccacaaatactagaacttgggaagtttctcacaaatgcaaactattacgagctctgatcccggaattaccacatttgccaaaggggagagtttccttaccaaagaagctgatggtgctggtggcggtggaggaagcagggaggaacccaaactgagggagtgttgcatttccagggaaaggaggagggtatgcctgggcctgtgctcagggctgggtggctgtgaccatctgtagttcacccaggcaggacacagctccagagaagcgctgccttgaggtcaccaaggaaagtgctggcagagccgccagtcccttcccttcctgcctgcctgccccaacatttacccttgagtttcaaacaacacggccgccttcacagccctgggaacccggaggaagacccgcttgggattcagatgcggaatcatctgaattcaggtgggcatatcccacccccatctgtgagaaccagggttctttgctgtcaccccagccttcggtcagctctactaccttacctccatctgtgattcttgtgccactccaagtcccagtttttttttttttttttttttttttttttttgagatggagtcttgctctgccacccaggctggagtgtggtggtgcgatcttggctcactacaacctccgcctcccgggttcaagcaattctcccacctc[134 bp omitted]tggcctcctaaagtgctgtgattacaggagtgagccactgtgcccggcccccaacccctttccttagatgcctgggacaggagtctgtgcctgggaaagaatacaggagacctcagctttggaccaaaaggaaaggaagaattaggaaggatgtgtgctatgtgtgtgggggggtagacagaaaaacggcccccaaacatgcccacactctgatccaggaccctgtcaatgtgaccttacatggcaaagggactttgcagatgtgatgaagataaagaggttaccctggcttatccacgtgagccccaggtgaccacaggggttcttcagggaggcaggagtcagagggagatgtgcctatggaagaatggactgagagacactgtgctgctggctttgaagatgagggggccacaagccaaggaacacaggcggcttcggcctctagagctaaagaaggacatagcctctcccctagagtttcccagaggaactacacaccatgcacccatttagactctggacccccagcactgtgaaaatacattcgtgttgctttaaaccactacatttgtgatgacttgttacagcagccactagaaaccaatggcggtaggttgagggacgatggagaaagaacagaatgaaatctagataggtggatgggaatacacagagcagagctggggttgagaaaggggctggggtcaggggcaggtctgcccttgtgcatggagaccaaggcggctggtacagaaaggaaagtgaggtgtgattctgaaaatccagacatcccctggtgctggggcaaccctgccaggactgtggatgtgtgtgggtggattgccactgacacccagccacgataggccatctatgatgggagggaaggacaaggttgcctccgaacacagaggaaggctaacggtggggatggtgtcggctccactgggccagatttccgtttgttccctgctgtattcgcagcacctgcagcagtgcctggtacacagtagggactcagtaacaaccatttactagggacctactgtgtaaccggcaccgtgccagagcactgcactgcagcacaccgagcccttcctgggtgggaaacaagtgcagactccccaaggccacccagcaaacagcagacccatgatgggaaaccagagctttccagggccaagtcttgacattctgcctgggacgggagagtttcattgaggaaaagatgttagaattaagtgttggccaagtgtggtggctcacatctgtaatctcagcactttgggaggctgaggtgggtggatcacctgaggtcaggagttcgagactag[256 bp omitted]accccgtctgcactaaaaatacaaaaaaaaattagccaggcgtggtggtgggtgcccgtagtcccagctactcgggaggctgaggcaggagaatggcatcaacccgggaggcggagcttgcagtaagccgagatcacaccactgcactccagcctgggagacagagcgagactccgtctcaaaaacaaaaaaacaaaaattagcctggcatggtggcgtgtgcctgtgatcccagatagaggtgggaggatgacttgagcccaggagtttgaggctgcagtgagctgtgatcatgccaccatacttcagcctgggcggctgagcgagaccccgtctcaaacaaataaaaaagttctgggaggcacttgaacaaaggcccatggcattcggctgacagccacctggtggcactgctgacaacgcagagcccagatgcaagacggacagggtgcggagctgtctccgtgggacctcccctttccccatggaattcgttatttcagatttgggggaagtatgaccggtggaaccagagagaccagaacagggcagaaaagagcagagagtgagggagtggagaggagagaaacaaggggagatcagagatgggctgggctcagcccagggaaatttgattcctgctgaggctcagacgccgtcctccaacactgccttccctcacttgccctcccgtgggaacctctggccaggaccatctccatgagtgctagtgctgggattctccgtctgcaaactccacaagtctaactactctgcttcttaaccgtctcctgaatcagttcctctttcctttgcgtcaaagaaaatccccctaaaccttgaataacagatcagctccaagtctgcccttcaagaactgaagtcaactgaccaacaccttcctaagtggaccttagccaaggcagatgctcaagcggtccaggccaaatggccagaccagagtgccttgggagcatgagaccatgagtgggtcagggtctgggttatgttgggaaagactcaccgagactctgtgtgggaggagtgaggagactgttgcagtcgcctggcgggagctggcggtggcctgggctttcctgtcctgctctcttacataactaccctgcctggggtatggccaaccccattggtagaaaacagagtgggccagggatggtggctcgcgcctgtaatcccagtactctggcaggccgaggtgggtggattacctgaggtcaggagttcgagaccaagctgaccaacatggtgaaacccccgtctctactaaaaatataaaaattagccaggtgtggtggtgtgtgcctgtaatcccagctactcgagaggctgaggcggaggttgcagtgagccgagatcgcactactgcactccagcctgggtgacagagcgagactctgtctaaaacaaacagacacacaaaacaaacaaacaaacaaaaacccaaagccatggagagggtctgctttcctttttctttttttttttttgagacagagtctcactctgtcatccagtgcagtggtataatcacagctcactgcagcctcgactttctgggctcaaatgattctcctgccctagcctcccgttagctgggactacaggcatacgccgccatgcccagctaatattcgattttttgtagagatggggtctcactatgttgcccaggctggtctccaactcctgggctgaagccatcctcccacctctgcctcccaaagtgccaagattacaggcacgagccaccacgtccagcgagggttgcttttctaagccaaatctgtgacatggaagagctcccctctcccacccctatatgttcacctccaccaaaaggccacctctcctccacagaaccaggtatccccaatagtagggagggaggaagggacagggatacctgtgggttttcaactgtcctctctctctcctccttaggtcacctggcattctggtcccattttcctccctgatgcctttcaacctacaggcataaccgacttgcattaaggacctgtgtggagacaaaggaacagggtgtgtgtggctgtgtgtctgtcagctcctcgggggagaagctgtgatggatcaagctgtcttccccaggctgtcactggaacttttactgcatgttcagatgtttcaatgcctaaatgttcccgtgtgctcactacccaggaggccgcaccaccctgccacaacccagtgacattggtgggcatttaaagacataaaagctaggccgggcgcagtggctcacgcctgcaatcccagcactttgggaggctgggggggggggggcggggtgtgggggggcggatcacctgaggtcgggagtttgagaccagcctgaccaacatggagaaaccccatctctacaaaaaaaaattacaaaattagccaggtatggtggtgcatgcctgtaatcccagctactcgggaggctgaggcaggagaattgcttgaacctgggaggcggaggttgcagtgagccgagatcacaccactgcactccagcctgggcaacaagagtgaaactcggtctcaaaaaaacaaactaactcattttgtgaataggtagtatgttcacattgttgtagctcaaaaggtacaaaagggaatagtgtggcctgtcttccctgagtcccacagcctcccagccctgctccctggagacaggctgctgttgcacatctttgcagagacttgctgtgcgtttaaacaaaagcgtggttggcactatccccacctgcacacaaaaggccgcctgctacatgcactgttctctactgttctttatgtatcttagaaatcgttttaagcaggcttattctcctcacccgggtagatgaggaaaccgaggccctcagagggggcgacttgcccagggtaccaaaatcctgcctctgccacttgctacacaggatggcctcaaggcagtagctaaatgatttgtggattcactgattttcaaccttctctcctgctttcccctgaagtcacctgacggctaattagcagctactttctccttcccactccccaggcccagaagctaccaaaggagctctggtcgcaggaccaacagcaattttccccacaggaaaaacgaatcagctaagacaaccatggaaaagttaggaaacagccagagagagattttaaggaagattctagaaccaccgcttgctcttaatataaaaggactggaagagatttgaggaatactctggtgccaaggcttcttcctttttggccaataacttttatttcttactcttgtattgaaagttttttcccctctacctactgcattaaaaaaaaatttttttttttctaagacaaggtctcactctgtctcccaggctggagtgcagtggtgcaatcacgctcatagcctcaacctcccgggctccagtgggcctcccacctcagcctccctaatagctgggattacacatgtgtgccaccacaccagctaattttttttttttgagacggagtctcactctgtcatcaggctggagtgcagtggcgtgatctcagctcatcgcaacctctgcctcccgggttcaagctattctcctgcctcagcctcccaagtagctgggactacaggcgcgtgccaccacacccagctaacttttgtatttttagtagagacggggtttcgccatgttggccaggatggtatgaatctctcgaccttgagatccgcccacctcggtctcccaaggtgctgggattacaggcgtgagccaccatgcccggcctaggagtttctttttagcgtgatgaaaatgttctaaaattgactgtggtgatggctgcacaactctgtcaacgtactaaagccactaagttggacactgataaatggatatggattatacagtatctcaataaagccactcaaccaaccaaccgaccaaccaaccaaccagggggtgctgggaaggggttgagaggcctccatgaggctgtggaggcggataggcgtcaggctcagagctgactttaccccgagggcaacggctcgggcagagtttctaagggcaggcccatgccttccttggggtggccggtaatgctggttgagaacaggctggggaagagcctagagctgaaacgctctggttggcggtgcaggcacaggacatcaaggcctggagagggactgaggcatcagggctgagggactctgagagcagcggacaggcgtgtgtggcgggggaggaacggcgcacacctgtgccccatccgcagcccctcttcttgtcaacatcagcttccccggggagaggcagtgatgttggtgggggaaggagggaagggcccaggccgggctgtggtggagacggttgctatggaggtttctctgggaaccaggtgaaggcagccagaagatgggggcagggtggctttcattatgagaactggaagcaaacacagccccttcctgcctcggcggacatctccacacccacatttcatggcatttctcacgcgctgggctgtttccagggcttcacctgttctcactcacttaactttcccccagcaatgtgacgaagcgaaactatcatggctcccatttataaatgagcaaactgagaaaggggagaggacttcagtcacctgcgtaaagtcccacaaccagtaagggctggcccaggtgtctggccccacagctgagctcctaaccgcaccgagcctctccaaaacatggtctttttttgctccccactgccaccaccatcaccgtcccctgcctcatccagtcccccttcccattctccagagacttcctgggccatctccatgaccttccagaccagcctgggcttcactctcaaatccaattcaggatgatccgcccgccccagctgcagacgatggcctgagacgcctgcagggaagagaggggcgtccgctgctcgccaacccccatacgttcctgctctgtggtaggtcaggaagaagagggcaaaggagtctgcatcaaactgggctaaggcctggcgctctgatggccgctgacctcaaaactctccatggggggtacccctctgcccattgagggggcacctagggagcctaggggtcccgtgaggccctcccaccatggttccccgcctctgcctctccccgcagctccgaccatgaccatccatcctatgagtgctggctgggctcaagcccgggtactttcctccgtgcccaagcaaccctgtaggaaccacatatcctgggccagacgaatgcaggagctgcctcctctggacacagcggtggctctcacctcccttccatcttggcaggatgagtgcatttgctgcgagaaagcagccccgacggcagggccctagggccccaggccaggccaccacgaccacgagggaccaagacaacaagcccactcctgaatcacgcctcaacacagacaacatgatgtccaaaccacagaaacgaccaaacacccctcctgactcagagctgctggctgtttctcaactaaccccggcggcactagctccctttgcttctcaggctctaggtcaaatagatgcgagtcatgggcttgcccctgacacagcccaactcctcaagttagcccaaacgcctccttattgaggtgccctgcgagtccctgtgggggacagtcttcctgccgcaatgagcaatgtgctcctggtggcctctggctgggggcatggggattaggaagagagtaataagacaccagccccacttccagcaggcatcctgaacctcaggaaggattctttaggcctcctcctctgctccccagaaacactgtcctcccctccttcacatgggaccgggctgtgtcggaatgaagccctactccgtctcactgcttgtaaagtccagcacagaggggaccagcctcaatcctcggagactcttggaatgagggctgggttccttttgctctctgctgtggacagagaggatgacagctgtggggaggggaagtcacagagggccagcagcctgagtcctgtccacactggtggtttgctggggttttccaggtttttctgaattacttgcctacctttaaaacttggatctcacagaaaaaaaaaaaactggatttccagcttctcccgtgaaaccagcagctttgcaccaccagcgctgccagtgttgctgcggccccggtgcctttcaggggcccaggtgcttctgggagccacccctccctctgggcctgacacagggcccaaggtggtcagcagttcaccggtccaggcctcttcccatgtcaaccccctgcccctccacactgccccaaggtagttctatgattgtgcccattttactgatgaggtgaccacaggtcggggggtacagtatcttgtcccagaccactaagcggtgagtgatggcatcctgggctctaggacactggtgtcagttgttatcagtttgctgtgtccctttttttttgcataagagctgtgactgcttctactgaagggacaagggcaggcacaagggagggaaggggctctggaggactgtgggccacgtggcagcctgtgctgtctcccagcccccgcgtcatcctctccccaactgagctggccttggcctacctgcccttgtttgccaggactcccaccttcaaccccggcacccctggcctgcgtgacccagttaccctccctggctcctctcagggacctcagtatcacattcgctggcctctgtgctgagcaactcattagaaaatgtattgatgcctacggaaatagcagcacagggcggggggttgtggggaacgtttctgggaatgaggagggccctgactttgccctcgaagcgttcgggggagcagtcacgtaggcagacatctgcacacggcggatctgaaagcagaagcaggcgtggcgagaacagagagaatcacacacagacccgggctctggcagccgccggcttcactgatgccatctccacagcgctcccacaccaggccccagagcaggaactactgctcacagggcatttccctatgccaggccccactctaggtatttcacgcacatttacacatttaatcctcaaaaccaccgtctgcaatggaccatctcatccccattttacggaggggaaactgagtcatagaaagaggatgccacttgctgagggtcacagaagtggtggagttggggtgtgaacccagcaggctggctctagggcccatgctctgacccacgctgcggaaggcagccgaggctcggcagatgagggccctgcctgcactccagtctacaactgagtgctgggctcaggaccagaaccccggtctgtctgatgcaaaactcggagccttttccatcatgccaggaggccaccgtgattgggaaagcagtgaggagttgcggcaatagcagggcgatggcacggtgcaggtgcaggcaggaatcgatagcgtctggcaactgtgagcagcagcaggcctgaggtgagggtcagggcttggagacctcccagagactacaccatgggcctcggggccctggaagctgtgcagcatggtggaggctgaggtcccatctaactggcactgtgattttcacaaccccccttacctctcgggacctcagtcttgactcctgctaacaagcctctgtgatctgaggccccttcttggcaccgagcctcagattctcagggtcctgcacgggtggctgatctccctccctctccacaccacccctactcttgctgtgcgggggttctcccttatccaaggctctgctaaccgggagcggttgccaggtgtgctggggtccccagagaatccccgaactccccgtccccgtcaaacagccagggctgatgcaacctgcctgcaaccaccgcctcactccccaagccaggcccctccgcaccgaaaaagagtccccagtagccccacccttgcttcaagccccagctcaggagttgaaggggagctcgaggctgggggaggccaggacatgagtcctgaaggggccacaggcctgggtcaggaatgtgcacacgaggggactcagggttcgaagatctggggagaagggtcgcaggcaaccactgatgaccggctatgaactagaacaggctgggaggggctggagagctaagggtgccaactggcacccactcaccctgagtccagctgctaagtctggctgggctgaagtgggtgggacccaatagctagagagaaaaggcggcaaaacggtggggaggggaagcagagtccctgcccagacacctctgcagccagcataaaccgcacatagccagcaatgcaattctcctactgaccaagctattaaaaattacccacaccgggccaggcgcggtggttcacgcctgtaataccagcactttgggaggctgaggcgggtggatcgcctgagttcgggagttcgagaccagcctgaccaacatggagaaaccccgtctctactaaaaatacaaaattagccatgtgtggtgacacatgcctgtaatcctagctactcgggaggctgaggcaggagaatctcttgaacccaggaggcagaggttgcggtgagccgagatggcaccattgcactccagcctgggcaacaagagtgaaactccgtctcaaaaaaccaaaaaaattaaaaaacaaaacaaaacaaaaaacccaggccgggcacagtggctcaggcttgtaatcctaacactttgggagggtgaggcaggaggatcgtttgagcccaggaatcaggaattcaagaccagcctgggcaacatagtaagaccctcccccccatctctactaaaaaaagccaaaaaaaaaaaaaaatagcatcctacctggccatcctctcaatatcccgcaatcccagtctgagacaaaaccaaatggaagcacattccataaaatacccaaccagcatttttccaaactgtcaaggtcatgaaggacaaggaaagtctaaaaccagtcacaggccagaggaggctgcggagccatgatgcctaaatataacgtggcatcctgaaggcatccggaaggagcagaaagggcattaagtaacaactaccaaaatcagcatcaagtgtggtcagaatcaagaatggcatttggtcaatggtaacatactgatgttgccttggttgtgacaaatgtggcaaagtaatgtaaaatgttaatggaaaaaaccaagtgaggggcatacagaaattctccgtattatctttgcaacttttctgttgagtcaatctacaattattccaaaataaaaaattttatttaaaaaataacccccttgggtacggtggctcacacctgtaatcccagcactttgggaggctgaggcaggcagatcacgaggtcatgagttcgagaccagcctgaccaacatggtgaaaccctgtatctactaaaaatataaaaattagccaggcatgatggtgcatgtctgtaatcccagctactctggagcctgaagcaggagaatggcttgaacctgggag[142 bp omitted]gcattttgggaggccgaggtgggtggatcacctgaagtcaggagttcaagaccagcctggccaacatggcaaaaccccgtctctactaaaaatacaaaaattagccaggcgtggtggtgggcgcctgtaatcccagctacttggaaggctgaggcaggagaattgcttgaatctgggaagtggaggttgaagtgagccaagatcatgccactgcactccagcctgggcgacacagcaagactctgtctcaaaaaaaccaaaccaaaccaaaccaaacccagtccccatgtacaatctagaagatcttcgtaggaaaagattctaccggcggggcgggggagatagggcacgtctgtgcgtccttaccactggcagtctgcccaacagtctacccttaattccatctgcttttgttcaaaaatctatacagcaatggaatgagaacacatccaccttaattacagcaataacaataaccacttttatgcagcacctactgtgtcccaggcgttagtctaactgctcgacacggattaactcatttaatccttgtaacagccctaagaagtaggtacttttttttttttttttttgagacgaggtctcactctgtcacccaggctgcagtgtggtggcacaatctcggcttactgcaacctccgccccaccccagggttcaagtgatcctcctgccttagcctcatgagtagctgggaccacaggtgcaaaccaccacacccgactatttttttgtatttttggtagagacagggtttcaccatgttgcccaggctggtctcgaattcctgagatcaagcaatctgcccacctcagcctcccagggtggtgggactacaggcatgagccaccgtgcctggtccagaggtaggtattcttaatgccacttcgtaccacaggggaaactgaggcacagggaagggaaatggccagggtcacacagctagtaagaggggtgcagtcaagttttgaactcatataatctggctccagagtctatgccaggtatgtataaaatttggcttcctggggccacattgaagaattgtcttaggccacacataacatacactattgatagctgatgaacttaaaaaaaaatcgcaaaaaattcgcatgttttggtaaggtttacaaatttgtgttaggctgcattcaaagctgttctaggccgcatgcaggcccacgggtgggacaagctcagtctatgctcttagctgctactctgtatactgcctcagtgataacacagcccctataggcccaagaaaatatagggcaagtgctcaaaaactggcagagtggacagtaagtgctctaagggaaggtggtcagatcccaagaaggacttcctgcccgcaacaggtaaggaaggagaaagaagcttgtgtgtaccgctcagtatcaggattcctccaccttctctggaccttgattcagtctcctaactgccacagaagggatgaaggttgaactccagctgggatgtcctgatgtggatgggacaaggtgggtttctgcaacagagaaaagacggacatccacctcggctggtggaggagggcccagtgcatgagaaggggcaagatggctaccctgtgactaaacgaaaacggagatcttccatttttggcagggttgggagatagttcctatccagtggaagctgaaggacggtttgaaaggaagccaagggcaagggatggagaaaaggacgcagctggggcctcgatgtctgaatccctgccaggggatggggcctgggcacccatcatttggaatggaagatgaggatagctggaaacagacactttagagggatgagggagacagaagaatgacagcaggtgttggacagtccaacgtctgcggctcttacaagtggtaaggaagaaatga[355 bp omitted]agttgagctctgtgcataaggcttgccagacatcgtcttatttgagtctcataaacccaccaggcgagttgatttttcttattttacagatagggaaatgaagtaagagaacttaagttatttgcccgaggccatcctggcaggtctgtatttgggagagtgctgtgactcatgctggactctaacccacgagggtttctcagagtcagcagctgggggatgaagaagtgaaaagtgactggcaggaaattctgcaagcaaggaaagggaaagagaaatgaactggtgcaggtctgcgggaagagaatgaggctggatcctcaaaatcacaggaggaagcaggcccagacctcagaggcagaaagagaaagaaaccagagcttagagtcaggaggaggaaaccagaccccggagccacaaggagagggctggatccccggctcagagggaagaggtcggatccccagctgagagggaggagggtcccggaccctaggagtgggaaggaaaggctcggatcccctgatccccaggaggaggggacccggctgcctcccggttggggccgcgcgagggcggggcgcggaaggatccgggagggccgtgctccgccacccagtatatatctgtccccagtccccggggccgcctcattccctgtcctcggatcacagtctcttctcactacagtgtcgccgcctctgcctgcgtagccccggccatggctctgtagcctcgacccctttgtgcccccggcccgtctccgcgctcaccacgcctgcgctctccgctcccaccttctttcttcagccgaggccgccgccgcctctccttgctgcagccatggagtgagtaaccgcttacctcttctccaactgcctttcccgccctttcgcagctcgtggccctctttagggagccctggggggtggggagtcgcgagcggggaatcacggtcgcgcaggcgcagaagtagtacggtgggccgaaggcgcgcggctgcgcatgcgcactgggcccggggccgggtgggagagttctagactcgatgtttgtcagcccgcgtgcagctgggcctgagcactccaggggagggtgtgttttttttttttctaaacgattcttcgtgcttggttgttcctgcgcagtagcccaccagtgccccgtagtgaaagagctgcggaccctgaatggccgcacatgcgcattgatccccaagagggcggaggtgtaaaggcaattggaccgctcgggcgacgtagcatgcgccttggccctcggcgcagagccgcgtgtggacgggtggcgttcgggtagccgttctccgcgtgccccctctaccctcctccaccctccctgccccacgttgctctggctcacagcccagcttccttccttttaaaccaggcacctgctgaggcggggactggcttagattgacagggcagaaggcgggacccagaggcaaccctctaagtgggtggggatagaaccactgtcgtcacgatgggtgggatttcggaagcacattgtgagaaggggcggggctaaaccaaccgttagttgaggggtggggtttcgatgtgacaaagaggcggggcctctggggaatcgggggaggggcggagctaaataaacaatgaggggcggggcttggaggggcagcggcagagcgaggagtgggatttgagtggataacattgctgaagggctgcggcctggggcagttcccctgggaactggtttgggatggaagctaggaaggcagtggggccaaaaggaaatattttagaggaaggggcgtggctggaagaaaatgtccctgggattgagtttttccttgaggcgaaatattctgaggtggatgggaggggcctaaggtaattcccctgggagacctttaggttttttttttctgtattgggggaaggggtggggcatcggtcctactttaggacctaaagaaattcccttgggagtgggtggggctcagagatttgggtaaagaaagggcaaatttagaattcggagaggctgaggcttagtgttctaaacggtggttggaagggggagggaggagcctcatggacgtgcctgggggtgtggcttggcttccccttgattttggccggtggatgacgctgtcctgaccacacccactcttgtctcacgcgtgtaggtcttccactttcgccttggtgcctgtcttcgcccacctgagcatcctccagagcctcgtgccagctgctggtgcagcctctcctgttgccatcagtgcccagcacctgtgctacagccatgtcactcctggcgaccctggggctggagctggacagggccctgctcccagctagtgggctgggatggctcgtagactatgggaaactccccccggcccctgcccccctggctccctatgaggtccttgggggagccctggagggcgggcttccagtggggggagagcccctggcaggtaagggcaggtggaaggtggagctggggagtggagggcaggggaagatgggggaggaagaactcatccatgtattcaataaatattgagtgcctacaatgtgccaggcactgttttaggtgctgaggatacggctgggaacaagaagaacatggtctgtgccttccagcagctcacactgtggggagtagaccagagataaattaaatgagagtgtattggaataagtcaaaaacacctagcagctgagctacaaaatgacaaaggggacctaatatagaatgggtagccagaaaaccttctccaagtaggtaacatgttgactgaggcataaatgatgggaaggaagccaggcatgatggcctgtaatcccagcactttgggaggccaagcggggagaattgctttagtccaggagttcaggacgtgggcaacatagcgagacctcatatctataggaaaaaaaaaattagccaggcatggtggctcacgcttgtagtcacagctacttgggaggctgaggtgggaggatcgcttgagcctgggaggtctaggctgcagtgagccaagatgatgccactgcactgcagcctgggcaacagagtgaaaccctatcccttaaaataaaaaaaaagtagggaaggaatgaggaaaacacccaagggaagagcattttagttggagggaactgtatatgcagaagccctcaggaggcaggaatcatttcattcattactgtatcccaaatgcttggcacatagtgggttttcaataattaatgagtaaagatgaaacaaggcatatgtgcgtgtgtatctgtgtgtgtaatgtgatctagtttgccttttaaaaagagagaatagagacaccacagatacagagtactcggtaaaggagatgttggaatggttgaagaaatgcttggttgactgttgcttgagtcattggttggttggctggttctttttttcttttttaattttttttttctcctggaccctcttatgggttaagactgattctttcattggctaatttgttgggttttggttaactggttcattggttgattaatgggttgattggttggttgactgatttatttggttggttgaccgattccctgattgattggtcgactagttcattggttggttggttggttggttggttgactgggtggttagatggttgattgttggttggttcgttgactggtttattggtttcttcactggtttgttggtttattgactggtttgatgattcagtggttagttgttttactgaatgaatgggacagatgcacctgaatgagacgtgagtcagcacccaactacgcagaagaccagcaactcagggaattttgtgtccctccccactttaatcccaggtgatggcttctctgactggatgactgagcgagttgatttcacagctctcctccctctggagcctcccttaccccccggcaccctcccccaaccttccccaaccccacctgacctggaagctatggcctccctcctcaagaaggagctggaacagatggaagacttcttcctagatgccccgcccctcccaccaccctccccgccgccactaccaccaccaccactaccaccagccccctccctccccctgtccctcccctcctttgacctcccccagccccctgtcttggatactctggacttgctggccatctactgccgcaacgaggccgggcaggaggaagtggggatgccgcctctgcccccgccacagcagccccctcctccttctccacctcaaccttctcgcctggccccctacccacatcctgccaccacccgaggggaccgcaagcaaaagaagagagaccagaacaagtcggcggctctgaggtaccgccagcggaagcgggcagagggtgaggccctggagggcgagtgccaggggctggaggcacggaatcgcgagctgaaggaacgggcagagtccgtggagcgcgagatccagtacgtcaaggacctgctcatcgaggtttacaaggcccggagccagaggacccgtagctgctagaagggcaggggtgtggcttctgggggctggtcttcagctctggcgccttcatccccctgcctctaccttcattccaaacccctctcggccgggtgcagtggcttatgcttgtaatcccagcactttgggaggccaaggcaggaggatcgtttgaggccaggaggtcaataccagcctgggcaacatagtaagaccctgtctctattaaaaaaaaaaaatcaacccttcttccccaccaaaccacccaactcctctctactcttatccttttatcctctgtctctgcttatcacctctcttgcgtatttctggatctccttccctcctttctcgtccaaatcatgaaatgtttggccttagtcaatgtctatgcccgtcacataacagccgaggcaccgaggcccacagggaagcagctgggagcttggaaacctggt
